(19) United States
(12) Patent Application Publication
(10) Pub. No.: US 2007/0122887 A1
(43) Pub. Date: May 31, 2007

(54) Gene variants coding for proteins from the metabolic pathway of fine chemicals

(75) Inventors: Corinna Klopprogge, Mannheim (DE); Oskar Zelder, Speyer (DE); Burkhard Kroger, Limburgerhof (DE); Hartwig Schroder, Nublock (DE); Stefan Haefner, Ludwigshafen (DE); Uwe Ruffer, Meckenheim (DE); Claudia Isabella Graef, Lampertheim (DE)

Correspondence Address: LAHIVE & COCKFIELD, LLP, ONE POST OFFICE SQUARE, BOSTON, MA, 02109-2127, US

(73) Assignee: BASF Aktiengesellschaft, Ludwigshafen (DE)

(21) Appl. No.: 10/583,404

(22) PCT Filed: Dec. 16, 2004
(86) PCT No.: PCT/EP04/14338

§ 371 Date: Jun. 16, 2006

(30) Foreign Application Priority Data
Dec. 18, 2003 (DE) 103 59 661.5

(51) Int. Cl. C12P 13/04; C12P 13/08; C07H 21/04; C12N 9/10; C12N 15/74; C12N 1/21

(52) U.S. Cl. 435/106; 435/115; 435/193; 435/252.3; 435/471; 536/23.2

(57) ABSTRACT

The present invention relates to mutated nucleic acids and proteins of the metabolic pathway of fine chemicals, to processes for preparing genetically modified producer organisms, to processes for preparing fine chemicals by culturing said genetically modified organisms and to said genetically modified organisms themselves.

[0001] The present invention relates to mutated nucleic acids and proteins of the metabolic pathway of fine chemicals, to processes for preparing genetically modified producer organisms, to processes for preparing fine chemicals by culturing said genetically modified organisms and to said genetically modified organisms themselves.

[0002] Many products and byproducts of naturally occurring metabolic processes in cells are used in many branches of industry, including the food industry, the animal feed industry, the cosmetic industry and the pharmaceutical industry. These compounds, which are collectively referred to as “fine chemicals”, comprise, for example, organic acids, both proteinogenic and nonproteinoge amino acids, nucleotides and nucleosides, lipids and fatty acids, diols, carbohydrates, aromatic compounds, vitamins and cofactors and also enzymes.

[0003] They may be produced, for example, by large-scale fermentation of microorganisms which have been developed to produce and secrete large amounts of one or more desired fine chemicals.

[0004] An organism which is particularly suitable for this purpose is Corynebacterium glutamicum, a Gram-positive, nonpathogenic bacterium. Using strain selection, a number of mutant strains have been developed which produce various desirable compounds. The selection of strains which have been improved with respect to production of a particular compound is, however, a time-consuming and difficult process.

[0005] It is possible to increase the productivity of producer organisms by genetic modifications. For example, the specific mutation of particular genes in a producer organism may result in an increase in productivity of a desired fine chemical.

[0006] EP 1 108 790 A2 describes, starting from the wild-type sequence encoding a Corynebacterium glutamicum homoserine dehydrogenase, a mutated nucleic acid sequence encoding a homoserine dehydrogenase which has, compared to the wild-type sequence, the mutation Val59Ala. Furthermore, a mutated nucleic acid sequence encoding a pyruvate carboxylase which has the mutation Pro458Ser in comparison with the Corynebacterium glutamicum wild-type amino acid sequence is described. Introduction of said mutations into Corynebacterium glutamicum results in an increase in the lysine yield.

[0007] WO 0063388 furthermore discloses a mutated ask gene which encodes an asparto-kinase having the mutation T311I.

[0008] Other mutations in genes and proteins of the Corynebacterium glutamicum biosynthetic pathway of fine chemicals are described in WO 0340681, WO 0340357, WO 0340181, WO 0340293, WO 0340292, WO 0340291, WO 0340180, WO 0340290, WO 0346123, WO 0340289 and WO 0342389.

[0009] Although the mutations known in the prior art already result in producer organisms having optimized productivity, i.e. optimized yield of the desired fine chemical and optimized C yield, there is a constant need for further improving the productivity of said organisms.

[0010] It is an object of the present invention to provide further mutated genes and proteins which result in an increase in productivity in producer organisms of fine chemicals and thus in an improvement of biotechnological processes for preparing fine chemicals.

[0011] We have found that this object is achieved by proteins having the function indicated in each case in table 1/column 7 and having an amino acid sequence which has in at least one of the amino acid positions which, starting from the amino acid sequence referred to in each case in table 1/column 2, correspond to the amino acid positions indicated for said amino acid sequence in table 1/column 4 a proteinogenic amino acid different from the particular amino acid indicated in the same row in table 1/column 5, with the proviso that the proteins according to table 2 are excepted.

[0012] The present invention provides novel nucleic acid molecules and proteins which, on the one hand, can be used for identifying or classifying Corynebacterium glutamicum or related bacterial species and, on the other hand, result in an increase in productivity in producer organisms of fine chemicals and thus in an improvement of biotechnological processes for preparing fine chemicals.

[0013] C. glutamicum is a Gram-positive, aerobic bacterium which is widely used in industry for large-scale production of a number of fine chemicals and also for the degradation of hydrocarbons (e.g. in the case of crude oil spills) and for the oxidation of terpenoids. The nucleic acid molecules may therefore be used furthermore for identifying microorganism which can be used for production of fine chemicals, for example by fermentation processes. Although C. glutamicum itself is nonpathogenic, it is, however, related to other Corynebacterium species, such as Corynebacterium diphtheriae (the diphtheria pathogen), which are major pathogens in humans. The ability to identify the presence of Corynebacterium species may therefore also be of significant clinical importance, for example in diagnostic applications. Moreover, said nucleic acid molecules may serve as reference points for mapping the C. glutamicum genome or the genomes of related organisms.

[0014] The proteins of the invention, also referred to as Metabolic-Pathway proteins or MP proteins hereinbelow, have the function indicated in each case in table 1/column 7. Furthermore, they have in each case an amino add sequence which has in at least one of the amino acid positions which, starting from the amino acid sequence referred to in each case in table 1/column 2, correspond to the amino acid positions indicated for said amino acid sequence in table 1/column 4 a proteinogenic amino acid different from the particular amino acid indicated in the same row in table 1/column 5.

[0015] The “corresponding” amino acid position preferably means the amino acid position of the amino acid sequence of the MP proteins of the invention, which the skilled worker can readily find

a) by homology comparison of the amino acid sequence or

b) by structural comparison of the secondary, tertiary and/or quaternary structure of said amino acid sequence

with the amino acid sequence referred to in each case in table 1/column 2 and having the amino acid position indicated for said amino acid sequence in each case in table 1/column 4.

[0016] A preferred method of comparing homologies of the amino acid sequences is employed, for example, by the Lasergene Software from DNASTAR, inc. Madison, Wis. (USA), using the Clustal method (Higgins D G, Sharp P M. Fast and sensitive multiple sequence alignments on a microcomputer. Comput Appl. Biosci. 1989 April; 5(2):151-1), setting the following parameters:

[0017] Multiple Alignment Parameter:

Gap penalty 10

Gap length penalty 10

[0018] Pairwise Alignment Parameter:

K-tuple 1

Gap penalty 3

Window 5

Diagonals saved 5

[0019] In a preferred embodiment, the proteins have the function indicated in each case in table 1/column 7 and an amino acid sequence which has in an amino acid position which, starting from the amino acid sequence referred to in each case in table 1/column 2, corresponds to the amino acid position indicated for said amino acid sequence in table 1/column 4 a proteinogenic amino acid different from the particular amino acid indicated in the same row in table 1/column 5, with the proviso that the mutated proteins according to table 2 are excepted.

[0020] In a further preferred embodiment, the proteins of the invention have the amino acid sequence referred to in each case in table 1/column 2, where said protein has in at least one of the amino acid positions indicated for said amino acid sequence in table 1/column 4 a proteinogenic amino acid different from the particular amino acid indicated in the same row in table 1/column 5.

[0021] In a further preferred embodiment, the proteins of the invention have the amino acid sequence referred to in each case in table 1/column 2, where said protein has in one of the amino acid positions indicated for said amino acid sequence in table 1/column 4 a proteinogenic amino acid different from the particular amino acid indicated in the same row in table 1/column 5.

[0022] The amino acid sequences indicated in table 1/column 2 are Corynebacterium glutamicum wild-type sequences. Table 1/column 4 indicates for the particular wild-type amino acid sequence at least one amino acid position in which the amino acid sequence of the proteins of the invention has a proteinogenic amino acid different from the particular amino acid indicated in the same row in table 1/column 5.

[0023] In a further preferred embodiment, the proteins have in at least one of the amino acid positions indicated for the amino acid sequence in table 1/column 4 the amino acid indicated in the same row in table 1/column 6.

[0024] Another aspect of the invention relates to an isolated MP protein or to a section thereof, for example a biologically active section thereof. In a preferred embodiment, the isolated MP protein or its section regulates transcriptionally, translationally or posttranslationally one or more metabolic pathways in organisms, in particular in corynebacteria and brevibacteria.

[0025] The MP polypeptide or a biologically active section thereof may be functionally linked to a non-MP polypeptide to produce a fusion protein. In preferred embodiments, the activity of this fusion protein is different from that of the MP protein alone and, in other preferred embodiments, said fusion protein regulates transcriptionally, translationally or posttranslationally one or more metabolic pathways in organisms, in particular in corynebacteria and brevibacteria, preferably in Corynebacterium glutamicum. In particularly preferred embodiments, integration of said fusion protein into a host cell modulates production of a compound of interest by the cell.

[0026] The invention furthermore relates to isolated nucleic acids encoding an above-described protein of the invention. These nucleic acids are hereinbelow also referred to as Metabolic-Pathway nucleic acids or MP nucleic acids or MP genes. These novel MP nucleic acid molecules encode the MP proteins of the invention. These MP proteins may, for example, exert a function which is involved in the transcriptional, translational or posttranslational regulation of proteins which are crucial for the normal metabolic functioning of cells. Owing to the availability of cloning vectors for use in Corynebacterium glutamicum, as disclosed, for example, in Sinskey et al., U.S. Pat. No. 4,649,119, and of techniques for the genetic manipulation of C. glutamicum and the related Brevibacteium species (e.g. lactofermentum) (Yoshihama et al., J. Bacteriol. 162 (1985) 591-597; Katsumata et al., J. Bacteriol. 159 (1984) 306-311; and Santamaria et al. J. Gen. Microbiol. 130 (1984) 2237-2246), the nucleic acid molecules of the invention can be used for genetic manipulation of said organism in order to make it a better and more efficient producer of one or more fine chemicals.

[0027] A suitable starting point for preparing the nucleic acid sequences of the invention is, for example, the genome of a Corynebacterium glutamicum strain which is obtainable under the name ATCC 13032 from the American Type Culture Collection.

[0028] Customary methods can be employed for preparing from these nucleic acid sequences the nucleic acid sequences of the invention, using the modifications listed in table 1. It is advantageous to use for back-translation of the amino acid sequence of the MP proteins of the invention into the inventive nucleic acid sequences of the MP genes the codon usage of that organism into which the MP nucleic acid sequence of the invention is to be introduced or in which the nucleic acid sequence of the invention is present. For example, it is advantageous to use the codon usage of Corynebacterium glutamicum for Corynebacterium glutamicum. The codon usage of the particular organism can be determined in a manner known per se from databases or patent applications describing at least one protein and one gene encoding this protein of the organism of interest.

[0029] An isolated nucleic acid molecule encoding an MP protein can be generated by introducing one or more nucleotide substitutions, additions or deletions into a nucleotide sequence of table 1/column 1 so that one or more amino acid substitutions, additions or deletions are introduced into the encoded protein. Mutations can be introduced into one of the sequences of table 1/column 1 by standard techniques such as site-specific mutagenesis and PCR-mediated mutagenesis. Preferably, conservative amino acid substitutions are introduced at one or more of the predicted nonessential amino acid residues. A “conservative amino acid substitution” is one in which the amino acid residue is replaced by an amino acid residue having a similar side chain. Families of amino acid residues having similar side chains have been defined in the art. These families include amino acids having basic side chains (e.g. lysine, arginine, histidine), acidic side chains (e.g. aspartic acid, glutamic acid), uncharged polar side chains (e.g. glycine, asparagine, glutamine, serine, threonine, tyrosine, cysteine), nonpolar side chains (e.g. alanine, valine, leucine, isoleucine, proline, phenylalanine, methionine, tryptophan), beta-branched side chains (e.g. threonine, valine, isoleucine) and aromatic side chains (e.g. tyrosine, phenylalanine, tryptophan, histidine). A predicted nonessential amino acid residue in an MP protein is thus preferably replaced by another amino acid residue of the same side-chain family. Alternatively, in another embodiment, the mutations can be introduced randomly along all or part of the MP-encoding sequence, for example by saturation mutagenesis, and the resulting mutants can be tested for the MP activity described herein, in order to identify mutants which retain an MP activity. After mutagenesis of one or the sequences of Appendix A, the encoded protein can be expressed recombinantly, and the activity of said protein can be determined, for example, using the assays described herein (see example 8 of the Examples section).

[0030] The present invention is based on making available novel molecules which are referred to herein as MP nucleic acid and MP protein molecules and which regulate one or more metabolic pathways in organisms, in particular in corynebacteria or brevibacteria, particularly preferably in C. glutamicum, by transcriptional, translational or posttranslational measures. In one embodiment, the MP molecules regulate transcriptionally, translationally or posttranslationally one metabolic pathway in organisms, in particular in corynebacteria or brevibacteria, particularly preferably in C. glutamicum. In a preferred embodiment, the activity of the inventive MP molecules for regulating one or more metabolic pathways in organisms, in particular in corynebacteria or brevibacteria, particularly preferably in C. glutamicum, has an effect on the production of a fine chemical of interest by said organism. In a particularly preferred embodiment, the MP molecules of the invention have a modulated activity so that the metabolic pathways of organisms, in particular in corynebacteria or brevibacteria, particularly preferably in C. glutamicum, which pathways are regulated by the MP proteins of the invention, are modulated with respect to their efficiency or their throughput and this modulates either directly or indirectly the yield, production and/or efficiency of production of a fine chemical of interest by organisms, in particular in corynebacteria or brevibacteria, particularly preferably in C. glutamicum.

[0031] The term “MP protein” or “MP polypeptide” comprises proteins which regulate transcriptionally, translationally or posttranslationally a metabolic pathway in organisms, in particular in corynebacteria or brevibacteria, particularly preferably in C. glutamicum. Examples of MP proteins comprise those listed in table 1. The terms “MP gene” and “MP nucleic acid sequence” comprise nucleic acid sequences encoding an MP protein which comprises a coding region and corresponding untranslated 5′ and 3′ sequence regions. Examples of MP genes are listed in table 1.

[0032] The terms “production” and “productivity” are known in the art and include the concentration of the fermentation product (for example of the fine chemical of interest) produced within a predetermined time interval and a predetermined fermentation volume (e.g. kg of product per h per l).

[0033] The term “efficiency of production” comprises the time required for attaining a particular production quantity (for example the time required by the cell for reaching a particular throughput rate of a fine chemical). The term “yield” or “product/carbon yield” is known in the art and comprises the efficiency of converting the carbon source into the product (i.e. the fine chemical). This is, for example, usually expressed as kg of product per kg of carbon source. Increasing the yield or production of the compound increases the amount of the molecules obtained or of the suitable obtained molecules of this compound in a particular culture volume over a predetermined period.

[0034] The terms “biosynthesis” and “biosynthetic pathway” are known in the art and comprise the synthesis of a compound, preferably an organic compound, from intermediates by a cell, for example in a multistep process or highly regulated process. The terms “degradation” and “degradation pathway” are known in the art and comprise cleavage of a compound, preferably an organic compound, into degradation products (in more general terms: smaller or less complex molecules) by a cell, for example in a multistep process or highly regulated process.

[0035] The term “metabolism” is known in the art and comprises the entirety of biochemical reactions which take place in an organism. The metabolism of a particular compound (e.g. the metabolism of an amino acid such as glycine) then comprises all biosynthetic, modification and degradation pathways of this compound in the cell.

[0036] The term “regulation” is known in the art and comprises the activity of a protein for controlling the activity of another protein. The term “transcriptional regulation” is known in the art and comprises the activity of a protein for inhibiting or activating the conversion of a DNA encoding a target protein into mRNA. The term “translational regulation” is known in the art and comprises the activity of a protein for inhibiting or activating conversion of an mRNA encoding a target protein into a protein molecule. The term “posttranslational regulation” is known in the art and comprises the activity of a protein for inhibiting or improving the activity of a target protein by covalently modifying said target protein (e.g. by methylation, glycosylation or phosphorylation).

[0037] The improved yield, production and/or efficiency of production of a fine chemical may be caused directly or indirectly by manipulating a gene of the invention. More specifically, modifications in MP proteins which usually regulate the yield, production and/or efficiency of production of a fine chemical of a fine-chemical metabolic pathway may have a direct effect on the total production or the production rate of one or more of these desired compounds from this organism.

[0038] Modifications in those proteins which are involved in these metabolic pathways may also have an indirect effect on the yield, production and/or efficiency of production of a fine chemical of interest. Metabolism regulation is inevitably complex and the regulatory mechanisms which effect the different pathways may overlap in many places so that more than one metabolic pathway can be adjusted quickly according to a particular cellular event. This makes it possible for the modification of a regulatory protein for one metabolic pathway to also affect many other metabolic pathways, some of which may be involved in the biosynthesis or degradation of a fine chemical of interest. In this indirect manner, modulation of the action of an MP protein may have an effect on the production of a fine chemical which is produced via a metabolic pathway different from that directly regulated by said MP protein.

[0039] The MP nucleic acid and MP protein molecules of the invention may be used in order to directly improve the yield, production and/or efficiency of production of one or more fine chemicals of interest from nonhuman organisms.

[0040] It is possible, by means of gene recombination techniques known in the art, to manipulate one or more regulatory proteins of the invention so as for their function to be modulated. The mutation of an MP protein which is involved in repressing the transcription of a gene encoding an enzyme required for the biosynthesis of an amino acid, such that said amino acid is no longer capable of repressing said transcription, may cause, for example, an increase in production of said amino acid.

[0041] Accordingly, modification of the activity of an MP protein, which causes an increased translation or activates posttranslational modification of an MP protein involved in the biosynthesis of a fine chemical of interest, may in turn increase production of said chemical. The opposite situation may likewise be useful: by increasing the repression of transcription or translation or by posttranslational negative modification of an MP protein involved in regulating the degradation pathway of a compound, it is possible to increase production of said chemical. In any case, the total yield or the production rate of the fine chemical of interest may be increased.

[0042] Likewise, it is possible that said modifications in the protein and nucleotide molecules of the invention may improve the yield, production and/or efficiency of production of fine chemicals via indirect mechanisms. The metabolism of a particular compound is inevitably linked to other biosynthetic and degradation pathways in the cell and necessary cofactors, intermediates or substrates in a metabolic pathway are probably provided or limited by another metabolic pathway. Modulating one or more regulatory proteins of the invention can therefore influence the efficiency of the activity of other biosynthetic or degradation pathways of fine chemicals. In addition to this, manipulation of one or more regulatory proteins may increase the overall ability of the cell to grow and to propagate in culture, particularly in large-scale fermentation cultures in which growth conditions may be suboptimal. It is possible to increase the biosynthesis of nucleotides and possibly cell division, for example by mutating further an inventive MP protein which usually a repression of the biosynthesis of nucleosides as a response to a suboptimal extracellular supply of nutrients (thereby preventing cell division), such that said protein has a lower repressor activity. Modifications in those MP proteins which cause increased cell growth and increased division in culture may cause an increase in the yield, production and/or efficiency of production of one or more fine chemicals of interest from the culture, at least owing to the increased number of cells producing said chemical in culture.

[0043] The invention provides novel nucleic acid molecules encoding proteins that are capable of carrying out an enzymic step involved in the transcriptional, translational or posttranslational regulation of metabolic pathways in nonhuman organisms. Nucleic acid molecules which encode an MP protein are referred to herein as MP nucleic acid molecules. In a preferred embodiment, the MP protein is involved in the transcriptional, translational or posttranslational regulation of one or more metabolic pathways. Examples of such proteins are those encoded by the genes listed in table 1.

[0044] Consequently, one aspect of the invention relates to isolated nucleic acid molecules (e.g. cDNAs) comprising a nucleotide sequence which encodes an MP protein or biologically active sections thereof and also nucleic acid fragments which are suitable as primers or hybridization probes for detecting or amplifying MP-encoding nucleic acid (e.g. DNA or mRNA). In other preferred embodiments, the isolated nucleic acid molecule encodes any one of the amino acid sequences listed in table 1. The preferred MP proteins of the invention likewise have preferably at least one of the MP activities described herein.

[0045] In a further embodiment, the isolated nucleic acid molecule is at least 15 nucleotides in length and hybridizes under stringent conditions to a nucleic acid molecule of the invention. The isolated nucleic acid molecule preferably corresponds to a naturally occurring nucleic acid molecule. The isolated nucleic acid more preferably encodes a naturally occurring C. glutamicum MP protein or a biologically active section thereof.

[0046] All living cells have complex catabolic and anabolic capabilities with many metabolic pathways linked to one another. In order to maintain an equilibrium between various parts of this extremely complex metabolic network, the cell employs a finely tuned regulatory network. By regulating the enzyme synthesis and enzyme activity, either independently or simultaneously, the cell can regulate the activity of completely different metabolic pathways so as to meet the cell's changing needs.

[0047] The induction or repression of enzyme synthesis may take place either at the transcriptional or the translational level or at both levels (for a review, see Lewin, B. (1990) Genes IV, Part 3: “Controlling prokaryotic genes by transcription”, Oxford University Press, Oxford, pp. 213-301, and the references therein, and Michal, G. (1999) Biochemical Pathways: An Atlas of Biochemistry and Molecular Biology, John Wiley & Sons). All of these known regulatory processes are mediated by additional genes which themselves react to various external influences (e.g. temperature, nutrient supply or light). Examples of protein factors involved in this type of regulation include the transcription factors. These are proteins which bind to the DNA, thereby causing expression of a gene either to increase (positive regulation as in the case of the E. coli ara operon) or to decrease (negative regulation as in the case of the E. coli lac operon). These expression-modulating transcription factors may themselves be subject to regulation. Their activity may be regulated, for example, by low molecular weight compounds binding to the DNA-binding protein, whereby binding of said proteins to the appropriate binding site on the DNA is stimulated (as in the case of arabinose for the ara operon) or inhibited (as in the case of lactose for the lac operon) (see, for example, Helmann, J. D. and Chamberlin, M. J. (1988) “Structure and function of bacterial sigma factors” Ann. Rev. Biochem. 57: 839-872; Adhya, S. (1995) “The lac and gal operons today” and Boos, W. et al., “The maltose system”, both in Regulation of Gene Expression in Escherichia coli (Lin, E. C. C. and Lynch, A. S. Editors) Chapman & Hall: New York, pp. 181-200 and 201-229; and Moran, C. P. (1993) “RNA polymerase and transcription factors” in: Bacillus subtilis and other gram-positive bacteria, Sonenshein, A. L. Editor ASM: Washington, D.C. pp. 653-667).

[0048] Protein synthesis is regulated not only at the transcriptional level but often also at the translational level. This regulation can be carried out via many mechanisms, including modification of the ability of the ribosome to bind to one or more mRNAs, binding of the ribosome to mRNA, maintaining or removing of the mRNA secondary structure, the use of common or less common codons for a particular gene, the degree of abundance of one or more tRNAs and specific regulatory mechanisms such as attenuation (see Vellanoweth, R. I. (1993) Translation and its regulation in Bacillus subtilis and other gram-positive bacteria, Sonenshein, A. L. et al. Editor ASM: Washington, D.C., pp. 699-711 and references therein).

[0049] The transcriptional and translational regulation may be directed toward a single protein (sequential regulation) or simultaneously toward a plurality of proteins in various metabolic pathways (coordinated regulation). Genes whose expression is regulated in a coordinated fashion are located in the genome often in close proximity in an operon or regulation. This up or down regulation of gene transcription and gene translation is controlled by the cellular or extracellular amounts of various factors such as substrates (precursors and intermediates which are used in one or more metabolic pathways), catabolites (molecules produced by biochemical metabolic pathways associated with energy production from the degradation of complex organic molecules such as sugars) and end products (molecules which are obtained at the end of a metabolic pathway). Expression of genes which encode enzymes required for the activity of a particular metabolic pathway is induced by large amounts of substrate molecules for said metabolic pathway. Correspondingly, said gene expression is repressed by the presence of large intracellular amounts of the end product of the pathway (Snyder, L. and Champness, W. (1977) The Molecular Biology of Bacteria ASM: Washington). Gene expression may likewise be regulated by other external and internal factors such as environmental conditions (e.g. heat, oxidative stress or hunger). These global environmental changes cause changes in expression of specialized modulating genes which trigger gene expression directly or indirectly (via additional genes or proteins) by binding to DNA and thereby induce or repress transcription (see, for example, Lin, E. C. C. and Lynch, A. S. Editors (1995) Regulation of Gene Expression in Escherichia coli, Chapman & Hall: New York).

[0050] Another mechanism by which the cellular metabolism can be regulated takes place at the protein level. This regulation is carried out either via the activities of other enzymes or via binding of low molecular weight components which prevent or enable normal function of the protein. Examples of protein regulation by binding of low molecular weight compounds include the binding of GTP or NAD. The binding of low molecular weight chemicals is usually reversible, for example in the case of GTP-binding proteins. These proteins occur in two states (with bound GTP or GDP), with one state being the active form of the protein and the other one the inactive form.

[0051] The protein activity is regulated by the action of other enzymes usually via covalent modification of the protein (i.e. phosphorylation of amino acid residues such as histidine or aspartate or methylation). This covalent modification is usually reversible and this is effected by an enzyme having the opposite activity. An example of this is the opposite activity of kinases and phosphorylases in protein phosphorylation: protein kinases phosphorylate specific residues on a target protein (e.g. serine or threonine), whereas protein phosphorylases remove the phosphate groups from said proteins. Enzymes modulating the activity of other proteins are usually modulated themselves by external stimuli. These stimuli are mediated by proteins acting as sensors. A well-known mechanism by which these sensor proteins mediate said external signals is dimerization, but other mechanisms are also known (see, for example, Msadek, T. et al. (1993) “Two-component Regulatory-Systems” in: Bacillus subtilis and Other Gram-Positive Bacteria, Sonenshein, A. L. et al., Editors, ASM: Washington, pp. 729-745 and references therein).

[0052] A detailed understanding of the regulatory networks which control the cellular metabolism in microorganisms is crucial for the production of chemicals in high yields by fermentation. Control systems for down-regulating the metabolic pathways may be removed or reduced in order to improve the synthesis of chemicals of interest and, correspondingly, those for up-regulating the metabolic pathway of a product of interest may be constitutively activated or optimized with respect to the activity (as shown in Hirose, Y. and Okada, H. (1979) “Microbial Production of Amino Acids”, in: Peppler, H. J. and Perlman, D. (Editors) Microbial Technology 2nd Edition, Vol. 1, Chapter 7, Academic Press, New York).

[0053] Another aspect of the invention relates to nucleic acid constructs such as, for example, vectors such as recombinant expression vectors, for example, which contain at least one nucleic acid of the invention.

[0054] This nucleic acid construct preferably comprises in a functionally linked manner a promoter and, if appropriate, a terminator. Particular preference is given to promoters which are heterologous with respect to the nucleic acid and are capable of expressing said nucleic acid in the nonhuman organisms. An example of a particularly preferred promoter in the preferred organisms of the genus Corynebacterium or Brevibacterium is the tac promoter.

[0055] The invention further relates to a process for preparing a nonhuman, genetically modified organism by transforming a nonhuman parent organism by introducing into said parent organism

a) at least one above-described MP nucleic acid of the invention or

b) at least one above-described nucleic acid construct of the invention or

c) a promoter which is heterologous with respect to the above-described endogenous MP nucleic acid of the invention and which enables said endogenous MP nucleic acid of the invention to be expressed in said organism.

[0056] Preferably, the promoter according to embodiment c) is introduced into the organism so as for the promoter to be functionally linked in said organism to the endogenous MP nucleic acid of the invention. A “functional linkage” means a linkage which is functional, i.e. a linkage which enables the endogenous MP nucleic acid of the invention to be expressed by the introduced promoter.

[0057] The term “parent organism” means the corresponding nonhuman organism which is transformed to the genetically modified organism. A parent organism here may be a wild-type organism or an organism which has already been genetically modified. Furthermore, the parent organisms may already be capable of producing the fine chemical of interest or be enabled by the transformation of the invention to produce the fine chemical of interest.

[0058] The term “genetically modified organism” preferably means a genetically modified organism in comparison with the parent organism.

[0059] Depending on the context, the term “organism” means the nonhuman parent organism or a nonhuman, genetically modified organism of the invention or both.

[0060] The MP nucleic acid of the invention or the nucleic acid construct of the invention may be introduced chromosomally or plasmidally as a self-replicating plasmid. The MP nucleic acids of the invention or the nucleic acid constructs of the invention are preferably integrated chromosomally.

[0061] In a preferred embodiment, the parent organisms used are organisms which are already capable of producing the fine chemical of interest. Among the particularly preferred organisms of the bacteria of the genus Corynebacterium and the particularly preferred fine chemicals lysine, methionine and threonine, particular preference is given to those parent organisms already capable of producing lysine. These are particularly preferably corynebacteria in which, for example, the gene coding for an asparto-kinase (ask gene) is deregulated or feedback inhibition has been removed or reduced. For example, these kind of bacteria have a mutation in the ask gene which results in a reduction or removal of feedback inhibition, such as, for example, the mutation T311I.

[0062] The invention therefore relates in particular to a genetically modified organism obtainable by the above-described process.

[0063] The invention furthermore relates to a nonhuman, genetically modified organism which has been transformed with

a) at least one above-described MP nucleic acid of the invention or

b) at least one above-described nucleic acid construct of the invention or

c) a promoter which is heterologous with respect to the above-described endogenous MP nucleic acid of the invention and which enables said endogenous MP nucleic acid of the invention to be expressed in said organism.

[0064] In another embodiment, an endogenous MP gene in the genome of the parent organism has been modified, for example functionally disrupted, by homologous recombination with a modified MP gene.

[0065] Preferably, expression of the nucleic acid of the invention results in the modulation of production of a fine chemical from said organism in comparison with the parent organism.

[0066] Preferred nonhuman organisms are plants, algae and microorganisms. Preferred microorganisms are bacteria, yeasts or fungi. Particularly preferred microorganisms are bacteria, in particular bacteria of the genus Corynebacterium or Brevibacterium, with particular preference being given to Corynebacterium glutamicum.

[0067] Particular preferred bacteria of the genus Corynebacterium or Brevibacterium as parent organisms or organisms or genetically modified organisms are the bacteria listed in table 3 below.

TABLE 3

| Bacterium | | Deposition number | | | | | | | |
|---|---|---|---|---|---|---|---|---|---|
| Genus | species | ATCC | FERM | NRRL | CECT | NCIMB | CBS | NCTC | DSMZ |
| Brevibacterium | ammoniagenes | 21054 | | | | | | | |
| Brevibacterium | ammoniagenes | 19350 | | | | | | | |
| Brevibacterium | ammoniagenes | 19351 | | | | | | | |
| Brevibacterium | ammoniagenes | 19352 | | | | | | | |
| Brevibacterium | ammoniagenes | 19353 | | | | | | | |
| Brevibacterium | ammoniagenes | 19354 | | | | | | | |
| Brevibacterium | ammoniagenes | 19355 | | | | | | | |
| Brevibacterium | ammoniagenes | 19356 | | | | | | | |
| Brevibacterium | ammoniagenes | 21055 | | | | | | | |
| Brevibacterium | ammoniagenes | 21077 | | | | | | | |
| Brevibacterium | ammoniagenes | 21553 | | | | | | | |
| Brevibacterium | ammoniagenes | 21580 | | | | | | | |
| Brevibacterium | ammoniagenes | 39101 | | | | | | | |
| Brevibacterium | butanicum | 21196 | | | | | | | |
| Brevibacterium | divaricatum | 21792 | P928 | | | | | | |
| Brevibacterium | flavum | 21474 | | | | | | | |
| Brevibacterium | flavum | 21129 | | | | | | | |
| Brevibacterium | flavum | 21518 | | | | | | | |
| Brevibacterium | flavum | | | B11474 | | | | | |
| Brevibacterium | flavum | | | B11472 | | | | | |
| Brevibacterium | flavum | 21127 | | | | | | | |
| Brevibacterium | flavum | 21128 | | | | | | | |
| Brevibacterium | flavum | 21427 | | | | | | | |
| Brevibacterium | flavum | 21475 | | | | | | | |
| Brevibacterium | flavum | 21517 | | | | | | | |
| Brevibacterium | flavum | 21528 | | | | | | | |
| Brevibacterium | flavum | 21529 | | | | | | | |
| Brevibacterium | flavum | | | B11477 | | | | | |
| Brevibacterium | flavum | | | B11478 | | | | | |
| Brevibacterium | flavum | 21127 | | | | | | | |
| Brevibacterium | flavum | | | B11474 | | | | | |
| Brevibacterium | healii | 15527 | | | | | | | |
| Brevibacterium | ketoglutamicum | 21004 | | | | | | | |
| Brevibacterium | ketoglutamicum | 21089 | | | | | | | |
| Brevibacterium | ketosoreductum | 21914 | | | | | | | |
| Brevibacterium | lactofermentum | | | | 70 | | | | |
| Brevibacterium | lactofermentum | | | | 74 | | | | |
| Brevibacterium | lactofermentum | | | | 77 | | | | |
| Brevibacterium | lactofermentum | 21798 | | | | | | | |
| Brevibacterium | lactofermentum | 21799 | | | | | | | |
| Brevibacterium | lactofermentum | 21800 | | | | | | | |
| Brevibacterium | lactofermentum | 21801 | | | | | | | |
| Brevibacterium | lactofermentum | | | B11470 | | | | | |
| Brevibacterium | lactofermentum | | | B11471 | | | | | |
| Brevibacterium | lactofermentum | 21086 | | | | | | | |
| Brevibacterium | lactofermentum | 21420 | | | | | | | |
| Brevibacterium | lactofermentum | 21086 | | | | | | | |
| Brevibacterium | lactofermentum | 31269 | | | | | | | |
| Brevibacterium | linens | 9174 | | | | | | | |
| Brevibacterium | linens | 19391 | | | | | | | |
| Brevibacterium | linens | 8377 | | | | | | | |
| Brevibacterium | paraffinolyticum | | | | | 11160 | | | |
| Brevibacterium | spec. | | | | | | 717.73 | | |
| Brevibacterium | spec. | | | | | | 717.73 | | |
| Brevibacterium | spec. | 14604 | | | | | | | |
| Brevibacterium | spec. | 21860 | | | | | | | |
| Brevibacterium | spec. | 21864 | | | | | | | |
| Brevibacterium | spec. | 21865 | | | | | | | |
| Brevibacterium | spec. | 21866 | | | | | | | |
| Brevibacterium | spec. | 19240 | | | | | | | |
| Corynebacterium | acetoacidophilum | 21476 | | | | | | | |
| Corynebacterium | acetoacidophilum | 13870 | | | | | | | |
| Corynebacterium | acetoglutamicum | | | B11473 | | | | | |
| Corynebacterium | acetoglutamicum | | | B11475 | | | | | |
| Corynebacterium | acetoglutamicum | 15806 | | | | | | | |
| Corynebacterium | acetoglutamicum | 21491 | | | | | | | |
| Corynebacterium | acetoglutamicum | 31270 | | | | | | | |
| Corynebacterium | acetophilum | | | B3671 | | | | | |
| Corynebacterium | ammoniagenes | 6872 | | | | | | 2399 | |
| Corynebacterium | ammoniagenes | 15511 | | | | | | | |
| Corynebacterium | fujiokense | 21496 | | | | | | | |
| Corynebacterium | glutamicum | 14067 | | | | | | | |
| Corynebacterium | glutamicum | 39137 | | | | | | | |
| Corynebacterium | glutamicum | 21254 | | | | | | | |
| Corynebacterium | glutamicum | 21255 | | | | | | | |
| Corynebacterium | glutamicum | 31830 | | | | | | | |
| Corynebacterium | glutamicum | 13032 | | | | | | | |
| Corynebacterium | glutamicum | 14305 | | | | | | | |
| Corynebacterium | glutamicum | 15455 | | | | | | | |
| Corynebacterium | glutamicum | 13058 | | | | | | | |
| Corynebacterium | glutamicum | 13059 | | | | | | | |
| Corynebacterium | glutamicum | 13060 | | | | | | | |
| Corynebacterium | glutamicum | 21492 | | | | | | | |
| Corynebacterium | glutamicum | 21513 | | | | | | | |
| Corynebacterium | glutamicum | 21526 | | | | | | | |
| Corynebacterium | glutamicum | 21543 | | | | | | | |
| Corynebacterium | glutamicum | 13287 | | | | | | | |
| Corynebacterium | glutamicum | 21851 | | | | | | | |
| Corynebacterium | glutamicum | 21253 | | | | | | | |
| Corynebacterium | glutamicum | 21514 | | | | | | | |
| Corynebacterium | glutamicum | 21516 | | | | | | | |
| Corynebacterium | glutamicum | 21299 | | | | | | | |
| Corynebacterium | glutamicum | 21300 | | | | | | | |
| Corynebacterium | glutamicum | 39684 | | | | | | | |
| Corynebacterium | glutamicum | 21488 | | | | | | | |
| Corynebacterium | glutamicum | 21649 | | | | | | | |
| Corynebacterium | glutamicum | 21650 | | | | | | | |
| Corynebacterium | glutamicum | 19223 | | | | | | | |
| Corynebacterium | glutamicum | 13869 | | | | | | | |
| Corynebacterium | glutamicum | 21157 | | | | | | | |
| Corynebacterium | glutamicum | 21158 | | | | | | | |
| Corynebacterium | glutamicum | 21159 | | | | | | | |
| Corynebacterium | glutamicum | 21355 | | | | | | | |
| Corynebacterium | glutamicum | 31808 | | | | | | | |
| Corynebacterium | glutamicum | 21674 | | | | | | | |
| Corynebacterium | glutamicum | 21562 | | | | | | | |
| Corynebacterium | glutamicum | 21563 | | | | | | | |
| Corynebacterium | glutamicum | 21564 | | | | | | | |
| Corynebacterium | glutamicum | 21565 | | | | | | | |
| Corynebacterium | glutamicum | 21566 | | | | | | | |
| Corynebacterium | glutamicum | 21567 | | | | | | | |
| Corynebacterium | glutamicum | 21568 | | | | | | | |
| Corynebacterium | glutamicum | 21569 | | | | | | | |
| Corynebacterium | glutamicum | 21570 | | | | | | | |
| Corynebacterium | glutamicum | 21571 | | | | | | | |
| Corynebacterium | glutamicum | 21572 | | | | | | | |
| Corynebacterium | glutamicum | 21573 | | | | | | | |
| Corynebacterium | glutamicum | 21579 | | | | | | | |
| Corynebacterium | glutamicum | 19049 | | | | | | | |
| Corynebacterium | glutamicum | 19050 | | | | | | | |
| Corynebacterium | glutamicum | 19051 | | | | | | | |
| Corynebacterium | glutamicum | 19052 | | | | | | | |
| Corynebacterium | glutamicum | 19053 | | | | | | | |
| Corynebacterium | glutamicum | 19054 | | | | | | | |
| Corynebacterium | glutamicum | 19055 | | | | | | | |
| Corynebacterium | glutamicum | 19056 | | | | | | | |
| Corynebacterium | glutamicum | 19057 | | | | | | | |
| Corynebacterium | glutamicum | 19058 | | | | | | | |
| Corynebacterium | glutamicum | 19059 | | | | | | | |
| Corynebacterium | glutamicum | 19060 | | | | | | | |
| Corynebacterium | glutamicum | 19185 | | | | | | | |
| Corynebacterium | glutamicum | 13286 | | | | | | | |
| Corynebacterium | glutamicum | 21515 | | | | | | | |
| Corynebacterium | glutamicum | 21527 | | | | | | | |
| Corynebacterium | glutamicum | 21544 | | | | | | | |
| Corynebacterium | glutamicum | 21492 | | | | | | | |
| Corynebacterium | glutamicum | | | B8183 | | | | | |
| Corynebacterium | glutamicum | | | B8182 | | | | | |
| Corynebacterium | glutamicum | | | B12416 | | | | | |
| Corynebacterium | glutamicum | | | B12417 | | | | | |
| Corynebacterium | glutamicum | | | B12418 | | | | | |
| Corynebacterium | glutamicum | | | B11476 | | | | | |
| Corynebacterium | glutamicum | 21608 | | | | | | | |
| Corynebacterium | lilium | | P973 | | | | | | |
| Corynebacterium | nitrilophilus | 21419 | | | | 11594 | | | |
| Corynebacterium | spec. | | P4445 | | | | | | |
| Corynebacterium | spec. | | P4446 | | | | | | |
| Corynebacterium | spec. | 31088 | | | | | | | |
| Corynebacterium | spec. | 31089 | | | | | | | |
| Corynebacterium | spec. | 31090 | | | | | | | |
| Corynebacterium | spec. | 31090 | | | | | | | |
| Corynebacterium | spec. | 31090 | | | | | | | |
| Corynebacterium | spec. | 15954 | | | | | | | 20145 |
| Corynebacterium | spec. | 21857 | | | | | | | |
| Corynebacterium | spec. | 21862 | | | | | | | |
| Corynebacterium | spec. | 21863 | | | | | | | |

The abbreviations have the following meaning:
ATCC: American Type Culture Collection, Rockville, MD, USA
FERM: Fermentation Research Institute, Chiba, Japan
NRRL: ARS Culture Collection, Northern Regional Research Laboratory, Peoria, IL, USA
CECT: Coleccion Espanola de Cultivos Tipo, Valencia, Spain
NCIMB: National Collection of Industrial and Marine Bacteria Ltd., Aberdeen, UK
CBS: Centraalbureau voor Schimmelcultures, Baarn, NL
NCTC: National Collection of Type Cultures, London, UK
DSMZ: Deutsche Sammlung von Mikroorganismen und Zellkulturen, Braunschweig, Germany

[0068] Another preferred embodiment are the genetically modified organisms of the invention, also referred to as “host cells” hereinbelow, which have more than one of the MP nucleic acid molecules of the invention. Such host cells can be prepared in various ways known to the skilled worker. They may be transfected, for example, by vectors carrying several of the nucleic acid molecules of the invention. However, it is also possible to use a vector for introducing in each case one nucleic acid molecule of the invention into the host cell and therefore to use a variety of vectors either simultaneously or sequentially. Thus it is possible to construct host cells which carry numerous, up to several hundred, nucleic acid sequences of the invention. Such an accumulation can often produce superadditive effects on the host cell with respect to fine chemical productivity.

[0069] In a preferred embodiment, the genetically modified organisms comprise in a chromosomally integrated manner at least two MP nucleic acids of the invention or a heterologous promoter functionally linked to an endogenous MP nucleic acid of the invention.

[0070] In another embodiment, the MP proteins and/or MP genes of the invention are capable of modulating the production of a fine chemical of interest in an organism, in particular in corynebacteria or brevibacteria, particularly preferably in C. glutamicum. With the aid of gene recombination techniques it is possible to manipulate one or more inventive regulatory proteins for metabolic pathways such that their function is modulated. For example, it is possible to improve a biosynthesis enzyme with respect to efficiency or to destroy its allosteric control region so that feedback inhibition of the production of the compound is prevented. Accordingly, a degradation enzyme may be deleted or be modified by substitution, deletion or addition such that its degradation activity for the compound of interest is reduced, without impairing cell viability. In any case, it is possible to increase the overall yield or production rate of any of the said fine chemicals of interest.

[0071] It is also possible that these modifications in the protein and nucleotide molecules of the invention can improve the production of fine chemicals indirectly. The regulatory mechanisms of the metabolic pathways in the cell are inevitably linked and activation of one metabolic pathway can cause repression or activation of another metabolic pathway in an accompanying manner. Modulating the activity of one or more proteins of the invention can influence the production or the efficiency of the activity of other fine-chemical biosynthetic or degradation pathways. Reducing the ability of an MP protein to repress transcription of a gene which encodes a particular protein in amino acid biosynthesis makes it possible to simultaneously derepress other amino acid biosynthetic pathways, since these metabolic pathways are linked to one another. By modifying the MP proteins of the invention it is possible to decouple to a certain degree cell growth and cell division from their extracellular environments; by influencing an MP protein which usually represses the biosynthesis of a nucleotide when the extracellular conditions for growth and cell division are suboptimal such that it now lacks this function, it is possible to enable growth, even if the extracellular conditions are poor. This is of particular importance for large-scale fermentative cultivation, for which the culture conditions with respect to temperature, nutrient supply or aeration are often suboptimal but still promote growth and cell division after the cellular regulatory systems for such factors have been eliminated.

[0072] The invention therefore furthermore relates to a process for preparing a fine chemical by culturing an above-described, genetically modified organism of the invention.

[0073] Furthermore, the invention relates to a process for preparing a fine chemical by

A) transforming a nonhuman parent organism with

a) at least one above-described MP nucleic acid of the invention or

b) at least one above-described nucleic acid construct of the invention or

c) a promoter which is heterologous with respect to the above-described endogenous MP nucleic acid of the invention and which enables said endogenous MP nucleic acid of the invention to be expressed in said organism,

and

B) culturing the genetically modified organism prepared according to feature A).

[0074] The genetically modified organism is cultured in a manner known per se and according to the organism. For example, the bacteria are cultured in liquid culture in suitable fermentation media.

[0075] In a preferred embodiment, at least one of the fine chemicals is isolated from the genetically modified organisms and/or the culturing medium after the culturing step.

[0076] The term “fine chemical” is known in the art and includes compounds which are produced by an organism and are used in various branches of industry such as, for example, but not restricted to, the pharmaceutical industry, the agricultural industry, the cosmetics industry, the food industry and the feed industry. These compounds comprise organic acids such as, for example, tartaric acid, itaconic acid and diaminopimelic acid, both proteinogenic and nonproteinogenic amino acids, purine and pyrimidine bases, nucleosides and nucleotides (as described, for example, in Kuninaka, A. (1996) Nucleotides and related compounds, pp. 561-612, in Biotechnology Vol. 6, Rehm et al., editors VCH: Weinheim and the references therein), lipids, saturated and unsaturated fatty acids (for example arachidonic acid), diols (e.g. propanediol and butanediol), carbohydrates (e.g. hyaluronic acid and trehalose), aromatic compounds (e.g. aromatic amines, vanillin and indigo), vitamins and cofactors (as described in Ullmann's Encyclopedia of Industrial Chemistry, Vol. A27, “Vitamins”, pp. 443-613 (1996) VCH: Weinheim and the references therein; and Ong, A. S., Niki, E. and Packer, L. (1995) “Nutrition, Lipids, Health and Disease” Proceedings of the UNESCO/Confederation of Scientific and Technological Associations in Malaysia and the Society for Free Radical Research—Asia, held Sep. 1-3, 1994, in Penang, Malaysia, AOCS Press (1995)), enzymes and all other chemicals described by Gutcho (1983) in Chemicals by Fermentation, Noyes Data Corporation, ISBN: 0818805086 and the references indicated therein. The metabolism and the uses of particular fine chemicals are further illustrated below.

I. Amino Acid Metabolism and Uses

[0077] Amino acids comprise the fundamental structural units of all proteins and are thus essential for normal functions of the cell. The term “amino acid” is known in the art. Proteinogenic amino acids, of which there are 20 types, serve as structural units for proteins, in which they are linked together by peptide bonds, whereas the nonproteinogenic amino acids (hundreds of which are known) usually do not occur in proteins (see Ullmann's Encyclopedia of Industrial Chemistry, Vol. A2, pp. 57-97 VCH: Weinheim (1985)). Amino acids can exist in the D or L configuration, although L-amino acids are usually the only type found in naturally occurring proteins. Biosynthetic and degradation pathways of each of the 20 proteinogenic amino acids are well characterized both in prokaryotic and eukaryotic cells (see, for example, Stryer, L. Biochemistry, 3rd edition, pp. 578-590 (1988)). The “essential” amino acids (histidine, isoleucine, leucine, lysine, methionine, phenylalanine, threonine, tryptophan and valine), so called because, owing to the complexity of their biosynthesis, they must be taken in with the diet, are converted by simple biosynthetic pathways into the other 11 “nonessential” amino acids (alanine, arginine, asparagine, aspartate, cysteine, glutamate, glutamine, glycine, proline, serine and tyrosine). Higher animals are able to synthesize some of these amino acids but the essential amino acids must be taken in with the food in order that normal protein synthesis takes place.

[0078] Apart from their function in protein biosynthesis, these amino acids are interesting chemicals as such, and it has been found that many have various applications in the food, animal feed, chemicals, cosmetics, agricultural and pharmaceutical industries. Lysine is an important amino acid not only for human nutrition but also for monogastric livestock such as poultry and pigs. Glutamate is most frequently used as flavor additive (monosodium glutamate, MSG) and elsewhere in the food industry, as are aspartate, phenylalanine, glycine and cysteine. Glycine, L-methionine and tryptophan are all used in the pharmaceutical industry. Glutamine, valine, leucine, isoleucine, histidine, arginine, proline, serine and alanine are used in the pharmaceutical industry and the cosmetics industry. Threonine, tryptophan and D/L-methionine are widely used animal feed additives (Leuchtenberger, W. (1996) Amino acids—technical production and use, pp. 466-502 in Rehm et al., (editors) Biotechnology Vol. 6, Chapter 14a, VCH: Weinheim). It has been found that these amino acids are additionally suitable as precursors for synthesizing synthetic amino acids and proteins, such as N-acetylcysteine, S-carboxymethyl-L-cysteine, (S)-5-hydroxytryptophan and other substances described in Ullmann's Encyclopedia of Industrial Chemistry, Vol. A2, pp. 57-97, VCH, Weinheim, 1985.

[0079] The biosynthesis of these natural amino acids in organisms able to produce them, for example bacteria, has been well characterized (for a review of bacterial amino acid biosynthesis and its regulation, see Umbarger, H. E. (1978) Ann. Rev. Biochem. 47: 533-606). Glutamate is synthesized by reductive amination of α-ketoglutarate, an intermediate product in the citric acid cycle. Glutamine, proline and arginine are each generated successively from glutamate. The biosynthesis of serine takes place in a three-step process and starts with 3-phosphoglycerate (an intermediate product of glycolysis), and affords this amino acid after oxidation, transamination and hydrolysis steps. Cysteine and glycine are each produced from serine, specifically the former by condensation of homocysteine with serine, and the latter by transfer of the side-chain β-carbon atom to tetrahydrofolate in a reaction catalyzed by serine transhydroxymethylase. Phenylalanine and tyrosine are synthesized from the precursors of the glycolysis and pentose phosphate pathway, erythrose 4-phosphate and phosphoenolpyruvate in a 9-step biosynthetic pathway which diverges only in the last two steps after the synthesis of prephenate. Tryptophan is likewise produced from these two starting molecules but it is synthesized by an 11-step pathway. Tyrosine can also be prepared from phenylalanine in a reaction catalyzed by phenylalanine hydroxylase. Alanine, valine and leucine are each biosynthetic products derived from pyruvate, the final product of glycolysis. Aspartate is formed from oxalacetate, an intermediate product of the citrate cycle. Asparagine, methionine, threonine and lysine are each produced by the conversion of aspartate. Isoleucine is formed from threonine. Histidine is formed from 5-phosphoribosyl 1-pyrophosphate, an activated sugar, in a complex 9-step pathway.

[0080] Amounts of amino acids exceeding those required for protein biosynthesis by the cell cannot be stored and are instead broken down, so that intermediate products are provided for the principal metabolic pathways in the cell (for a review, see Stryer, L., Biochemistry, 3rd edition, Chapter 21 “Amino Acid Degradation and the Urea Cycle”; pp. 495-516 (1988)). Although the cell is able to convert unwanted amino acids into the useful intermediate products of metabolism, production of amino acids is costly in terms of energy, the precursor molecules and the enzymes necessary for their synthesis. It is therefore not surprising that amino acid biosynthesis is regulated by feedback inhibition, whereby the presence of a particular amino acid slows down or completely stops its own production (for a review of the feedback mechanism in amino acid biosynthetic pathways, see Stryer, L., Biochemistry, 3rd edition, Chapter 24, “Biosynthesis of Amino Acids and Heme”, pp. 575-600 (1988)). The output of a particular amino acid is therefore restricted by the amount of this amino acid in the cell.

II. Vitamins, Cofactors and Nutraceutical Metabolism and Uses

[0081] Vitamins, cofactors and nutraceuticals comprise another group of molecules. Higher animals have lost the ability to synthesize them and therefore have to take them in, although they are easily synthesized by other organisms such as bacteria. These molecules are either bioactive molecules per se or precursors of bioactive substances which serve as electron carriers or intermediate products in a number of metabolic pathways. Besides their nutritional value, these compounds also have a significant industrial value as colorants, antioxidants and catalysts or other processing auxiliaries. (For a review of the structure, activity and industrial applications of these compounds, see, for example, Ullmann's Encyclopedia of Industrial Chemistry, “Vitamins”, Vol. A27, pp. 443-613, VCH: Weinheim, 1996.) The term “vitamin” is known in the art and comprises nutrients which are required for normal functioning of an organism but cannot be synthesized by this organism itself. The group of vitamins may include cofactors and nutraceutical compounds. The term “cofactor” comprises nonproteinaceous compounds necessary for the appearance of normal enzymic activity. These compounds may be organic or inorganic; the cofactor molecules of the invention are preferably organic. The term “nutraceutical” comprises food additives which are health-promoting in plants and animals, especially humans. Examples of such molecules are vitamins, antioxidants and likewise certain lipids (e.g. polyunsaturated fatty acids).

[0082] The biosynthesis of these molecules in organisms able to produce them, such as bacteria, has been comprehensively characterized (Ullmann's Encyclopedia of Industrial Chemistry, “Vitamins”, Vol. A27, pp. 443-613, VCH: Weinheim, 1996, Michal, G. (1999) Biochemical Pathways: An Atlas of Biochemistry and Molecular Biology, John Wiley & Sons; Ong, A. S., Niki, E. and Packer, L. (1995) “Nutrition, Lipids, Health and Disease” Proceedings of the UNESCO/Confederation of Scientific and Technological Associations in Malaysia and the Society for Free Radical Research—Asia, held on Sep. 1-3, 1994, in Penang, Malaysia, AOCS Press, Champaign, Ill. X, 374 S).

[0083] Thiamine (vitamin B₁) is formed by chemical coupling of pyrimidine and thiazole units. Riboflavin (vitamin B₂) is synthesized from guanosine 5′-triphosphate (GTP) and ribose 5′-phosphate. Riboflavin in turn is employed for the synthesis of flavin mononucleotide (FMN) and flavin adenine dinucleotide (FAD). The family of compounds together referred to as “vitamin B6” (for example pyridoxine, pyridoxamine, pyridoxal 5′-phosphate and the commercially used pyridoxine hydrochloride) are all derivatives of the common structural unit 5-hydroxy-6-methylpyridine. Pantothenate (pantothenic acid, R-(+)-N-(2,4-dihydroxy-3,3-dimethyl-1-oxobutyl)-β-alanine) can be prepared either by chemical synthesis or by fermentation. The last steps in pantothenate biosynthesis consist of ATP-driven condensation of β-alanine and pantoic acid. The enzymes responsible for the biosynthetic steps for the conversion into pantoic acid and into β-alanine and for the condensation to pantothenic acid are known. The metabolically active form of pantothenate is coenzyme A, whose biosynthesis takes place by 5 enzymatic steps. Pantothenate, pyridoxal 5′-phosphate, cysteine and ATP are the precursors of coenzyme A. These enzymes catalyze not only the formation of pantothenate but also the production of (R)-pantoic acid, (R)-pantolactone, (R)-panthenol (provitamin B₅), pantetheine (and its derivatives) and coenzyme A.

[0084] The biosynthesis of biotin from the precursor molecule pimeloyl-CoA in microorganisms has been investigated in detail, and several of the genes involved have been identified. It has emerged that many of the corresponding proteins are involved in the Fe cluster synthesis and belong to the class of nifS proteins. Liponic acid is derived from octanoic acid and serves as coenzyme in energy metabolism, where it is a constituent of the pyruvate dehydrogenase complex and of the α-ketoglutarate dehydrogenase complex. Folates are a group of substances all derived from folic acid, which in turn is derived from L-glutamic acid, p-aminobenzoic acid and 6-methylpterin. The biosynthesis of folic acid and its derivatives starting from the metabolic intermediate products guanosine 5′-triphosphate (GTP), L-glutamic acid and p-aminobenzoic acid has been investigated in detail in certain microorganisms.

[0085] Corrinoids (such as the cobalamines and, in particular, vitamin B₁₂) and the porphyrins belong to a group of chemicals distinguished by a tetrapyrrole ring system. The biosynthesis of vitamin B₁₂ is so complex that it has not yet been completely characterized, but many of the enzymes and substrates involved are now known. Nicotinic acid (nicotinate) and nicotinamide are pyridine derivatives which are also referred to as “niacin”. Niacin is the precursor of the important coenzymes NAD (nicotinamide adenine dinucleotide) and NADP (nicotinamide adenine dinucleotide phosphate) and their reduced forms.

[0086] Production of these compounds on the industrial scale is mostly based on cell-free chemical syntheses, although some of these chemicals have likewise been produced by large-scale cultivation of microorganisms, such as riboflavin, vitamin B₆, pantothenate and biotin. Only vitamin B₁₂ is, because of the complexity of its synthesis, produced only by fermentation. In vitro processes require a considerable expenditure of materials and time and frequently high costs.

III. Purine, Pyrimidine, Nucleoside and Nucleotide Metabolism and Uses

[0087] Genes for purine and pyrimidine metabolism and their corresponding proteins are important aims for the therapy of oncoses and viral infections. The term “purine” or “pyrimidine” comprises nitrogen-containing bases which form part of nucleic acids, coenzymes and nucleotides. The term “nucleotide” encompasses the fundamental structural units of nucleic acid molecules, which comprise a nitrogen-containing base, a pentose sugar (the sugar is ribose in the case of RNA and the sugar is D-deoxyribose in the case of DNA) and phosphoric acid. The term “nucleoside” comprises molecules which serve as precursors of nucleotides but have, in contrast to the nucleotides, no phosphoric acid unit. It is possible to inhibit RNA and DNA synthesis by inhibiting the biosynthesis of these molecules or their mobilization to form nucleic acid molecules; targeted inhibition of this activity in cancerous cells allows the ability of tumor cells to divide and replicate to be inhibited.

[0088] There are also nucleotides which do not form nucleic acid molecules but serve as energy stores (i.e. AMP) or as coenzymes (i.e. FAD and NAD).

[0089] Several publications have described the use of these chemicals for these medical indications, the purine and/or pyrimidine metabolism being influenced (for example Christopherson, R. I. and Lyons, S. D. (1990) “Potent inhibitors of de novo pyrimidine and purine biosynthesis as chemotherapeutic agents”, Med. Res. Reviews 10: 505-548). Investigations of enzymes involved in purine and pyrimidine metabolism have concentrated on the development of novel medicaments which can be used, for example, as immunosuppressants or antiproliferative agents (Smith, J. L. “Enzymes in Nucleotide Synthesis” Curr. Opin. Struct. Biol. 5 (1995) 752-757; Simmonds, H. A., Biochem. Soc. Transact. 23 (1995) 877-902). However, purine and pyrimidine bases, nucleosides and nucleotides also have other possible uses: as intermediate products in the biosynthesis of various fine chemicals (e.g. thiamine, S-adenosylmethionine, folates or riboflavin), as energy carriers for the cell (for example ATP or GTP) and for chemicals themselves, are ordinarily used as flavor enhancers (for example IMP or GMP) or for many medical applications (see, for example, Kuninaka, A., (1996) “Nucleotides and Related Compounds in Biotechnology” Vol. 6, Rehm et al., editors VCH: Weinheim, pp. 561-612). Enzymes involved in purine, pyrimidine, nucleoside or nucleotide metabolism are also increasingly serving as targets against which chemicals are being developed for crop protection, including fungicides, herbicides and insecticides.

[0090] The metabolism of these compounds in bacteria has been characterized (for reviews, see, for example, Zalkin, H. and Dixon, J. E. (1992) “De novo purine nucleotide biosynthesis” in Progress in Nucleic Acids Research and Molecular biology, Vol. 42, Academic Press, pp. 259-287; and Michal, G. (1999) “Nucleotides and Nucleosides”; Chapter 8 in: Biochemical Pathways: An Atlas of Biochemistry and Molecular Biology, Wiley, New York). Purine metabolism, the object of intensive research, is essential for normal functioning of the cell. Disordered purine metabolism in higher animals may cause severe illnesses, for example gout. Purine nucleotides are synthesized from ribose 5-phosphate by a number of steps via the intermediate compound inosine 5′-phosphate (IMP), leading to the production of guanosine 5′-monophosphate (GMP) or adenosine 5′-monophosphate (AMP), from which the triphosphate forms used as nucleotides can easily be prepared. These compounds are also used as energy stores, so that breakdown thereof provides energy for many different biochemical processes in the cell. Pyrimidine biosynthesis takes place via formation of uridine 5′-monophosphate (UMP) from ribose 5-phosphate. UMP in turn is converted into cytidine 5′-triphosphate (CTP). The deoxy forms of all nucleotides are prepared in a one-step reduction reaction from the diphosphate ribose form of the nucleotide to give the diphosphate deoxyribose form of the nucleotide. After phosphorylation, these molecules can take part in DNA synthesis.

IV. Trehalose Metabolism and Uses

[0091] Trehalose consists of two glucose molecules linked together by α,α-1,1 linkage. It is ordinarily used in the food industry as sweetener, as additive for dried or frozen foods and in beverages. However, it is also used in the pharmaceutical industry or in the cosmetics industry and biotechnology industry (see, for example, Nishimoto et al., (1998) U.S. Pat. No. 5,759,610; Singer, M. A. and Lindquist, S. Trends Biotech. 16 (1998) 460-467; Paiva, C. L. A. and Panek, A. D. Biotech Ann. Rev. 2 (1996) 293-314; and Shiosaka, M. J. Japan 172 (1997) 97-102). Trehalose is produced by enzymes of many microorganisms and is naturally released into the surrounding medium, from which it can be isolated by methods known in the art.

[0092] Particularly preferred fine chemicals are amino acids, in particular amino acids selected from the group consisting of L-lysine, L-threonine and L-methionine.

[0093] Another aspect of the invention relates to processes for modulating the production of a fine chemical from a nonhuman organism. These processes comprise contacting the cell with a substance which modulates the MP protein activity or MP nucleic acid expression such that a cell-associated activity is modified in comparison with the same activity in the absence of said substance. In a preferred embodiment, the cell is modulated with respect to one or more regulatory systems for metabolic pathways in organisms, in particular in bacteria of the genus Corynebacterium and/or Brevibacterium, in particular C. glutamicum, so that this host cell gives improved yields or an improved production rate of a fine chemical of interest. The substance which modulates the MP protein activity stimulate, for example, MP protein activity or MP nucleic acid expression. Examples of substances stimulating MP protein activity or MP nucleic acid expression include small molecules, active MP proteins and nucleic acids which encode MP proteins and have been introduced into the cell. Examples of substances which inhibit MP activity or MP expression include small molecules and antisense MP nucleic acid molecules.

[0094] Another aspect of the invention relates to processes for modulating the yields of a compound of interest from a cell, comprising introducing an MP gene into a cell, which gene either remains on a separate plasmid or is integrated into the genome of the host cell. Integration into the genome may take place randomly or via homologous recombination such that the native gene is replaced by the integrated copy, leading to the production of the compound of interest from the cell to be modulated. In a preferred embodiment, these yields are increased.

[0095] In another preferred embodiment, the fine chemical is an amino acid. In a particularly preferred embodiment, this amino acid is L-lysine, L-methionine or L-threonine.

[0096] The following subsections describe various aspects and preferred embodiments of the invention in more detail:

A. Isolated Nucleic Acid Molecules

[0097] The term “nucleic acid molecule”, as used herein, is intended to comprise DNA molecules (e.g. cDNA or genomic DNA) and RNA molecules (e.g. mRNA) and also DNA or RNA analogs which are generated by means of nucleotide analogs. Moreover, this term comprises the untranslated sequence located at the 3′ and 5′ end of the coding gene region: at least about 100 nucleotides of the sequence upstream of the 5′ end of the coding region and at least about 20 nucleotides of the sequence downstream of the 3′ end of the coding gene region.

[0098] The nucleic acid molecule may be single-stranded or double-stranded but is preferably a double-stranded DNA. An “isolated” nucleic acid molecule is removed from other nucleic acid molecules which are present in the natural source of the nucleic acid. An “isolated” nucleic acid preferably does not have any sequences which flank the nucleic acid naturally in the genomic DNA of the organism from which the nucleic acid originates (for example sequences located at the 5′ or 3′ end of the nucleic acid).

[0099] In various embodiments, the isolated MP nucleic acid molecule may have, for example, less than about 5 kb, 4 kb, 3 kb, 2 kb, 1 kb, 0.5 kb or 0.1 kb of the nucleotide sequences which naturally flank the nucleic acid molecule in the genomic DNA of the cell from which the nucleic acid originates (e.g. a C. glutamicum cell). In addition to this, an “isolated” nucleic acid molecule, such as a cDNA molecule, may be essentially free of another cellular material or culture medium, if it is prepared by recombinant techniques, or free of chemical precursors or other chemicals, if it is chemically synthesized.

[0100] Moreover, a nucleic acid molecule can be isolated via polymerase chain reaction, using the oligonucleotide primer produced on the basis of this sequence (for example, it is possible to isolate a nucleic acid molecule comprising a complete sequence from Appendix A or a section thereof via polymerase chain reaction by using oligonucleotide primers which have been produced on the basis of this same sequence from Appendix A). For example, mRNA can be isolated from normal endothelial cells (for example via the guanidinium thiocyanate extraction method of Chirgwin et al. (1979) Biochemistry 18: 5294-5299), and the cDNA can be prepared by means of reverse transcriptase (e.g. Moloney-MLV reverse transcriptase, available from Gibco/BRL, Bethesda, Md., or AMV reverse transcriptase, available from Seikagaku America, Inc., St. Petersburg, Fla.). Synthetic oligonucleotide primers for amplification via polymerase chain reaction can be produced on the basis of any of the nucleotide sequences shown in Appendix A. A nucleic acid of the invention may be amplified by means of cDNA or, alternatively, genomic DNA as template and suitable oligonucleotide primers according to standard PCR amplification techniques. The nucleic acid amplified in this way may be cloned into a suitable vector and characterized by DNA sequence analysis. Oligonucleotides corresponding to an MP nucleotide sequence may be prepared by standard syntheses using, for example, an automatic DNA synthesizer.

[0101] In a preferred embodiment, an isolated nucleic acid molecule of the invention comprises any of the nucleotide sequences listed in table 1/column 1 containing a back-translated mutation corresponding to the amino acid position according to table 1/column 4.

[0102] In a further preferred embodiment, an isolated nucleic acid molecule of the invention comprises a nucleic acid molecule complementary to any of the above-described nucleotide sequences, or a section thereof, said nucleic acid molecule being sufficiently complementary to any of the above-described nucleotide sequences for it to be able to hybridize with any of the sequences described above, resulting in a stable duplex.

[0103] Sections of proteins encoded by the MP nucleic acid molecules of the invention are preferably biologically active sections of any of the MP proteins. The term “biologically active section of an MP protein”, as used herein, is intended to comprise a section, for example a domain or a motif, of an MP protein, which can transcriptionally, translationally or posttranslationally regulate a metabolic pathway in C. glutamicum or has an activity indicated in table 1. In order to determine whether an MP protein or a biologically active section thereof can regulate a metabolic pathway in C. glutamicum transcriptionally, translationally or posttranslationally, an enzyme activity assay may be carried out. These assay methods, as described in detail in example 8 of the Examples section, are familiar to the skilled worker.

[0104] In addition to further naturally occurring MP sequence variants which may exist in the population, the skilled worker also understands that further changes can be introduced into a nucleotide sequence of table 1 via further mutation, leading to a further change in the amino acid sequence of the encoded MP protein in comparison with the wild type, without impairing the functionality of the MP protein. Thus is it possible, for example, to prepare in a sequence of table 1 nucleotide substitutions which lead to amino acid substitutions at “nonessential” amino acid residues. A “nonessential” amino acid residue in a wild-type sequence of any of the MP proteins (table 1) can be modified without modifying the activity of said MP protein, whereas an “essential” amino acid residue is required for MP protein activity. However, other amino acid residues (for example non-conserved or merely semiconserved amino acid residues in the domain having MP activity) may be nonessential for activity and can therefore probably be modified without modifying the MP activity.

B. Recombinant Expression Vectors and Host Cells

[0105] Another aspect of the invention relates to nucleic acid constructs such as, for example, vectors, preferably expression vectors, containing an inventive nucleic acid which encodes an MP protein. The term “vector”, as used herein, relates to a nucleic acid molecule capable of transporting another nucleic acid to which it is bound.

[0106] One type of vector is a “plasmid”, which term means a circular double-stranded DNA loop into which additional DNA segments can be ligated. Another type of vector is a viral vector, allowing additional DNA segments to be ligated into the viral genome. Some vectors are capable of replicating autonomously in a host cell into which they have been introduced (for example bacterial vectors with bacterial origin of replication and episomal mammalian vectors).

[0107] Other vectors (e.g. nonepisomal mammalian vectors) are integrated into the genome of a host cell when introduced into said host cell and thereby replicated together with the host genome.

[0108] Moreover, particular vectors are capable of controlling the expression of genes to which they are functionally linked. These vectors are referred to as “expression vectors”. Normally, expression vectors used in DNA recombination techniques are in the form of plasmids. In the present specification, “plasmid” and “vector” may be used interchangeably, since the plasmid is the most commonly used type of vector. The invention is intended to comprise said other types of expression vectors, such as viral vectors (for example replication-deficient retroviruses, adenoviruses and adeno-related viruses), which exert similar functions.

[0109] The recombinant expression vector of the invention comprises a nucleic acid of the invention in a form which is suitable for expressing said nucleic acid in a host cell, meaning that the recombinant expression vectors comprise one or more regulatory sequences which are selected on the basis of the host cells to be used for expression and which are functionally linked to the nucleic acid sequence to be expressed. In a recombinant expression vector, the term “functionally linked” means that the nucleotide sequence of interest is bound to the regulatory sequence(s) such that expression of said nucleotide sequence is possible (for example in an in vitro transcription/translation system or in a host cell, if the vector has been introduced into said host cell). The term “regulatory sequence” is intended to comprise promoters, enhancers and other expression control elements (e.g. polyadenylation signals). These regulatory sequences are described, for example, in Goeddel: Gene Expression Technology: Methods in Enzymology 185, Academic Press, San Diego, Calif. (1990). Regulatory sequences comprise those which control constitutive expression of a nucleotide sequence in many types of host cells and those which control direct expression of said nucleotide sequence only in particular host cells. The skilled worker understands that designing an expression vector may depend on factors such as the choice of host cell to be transformed, the extent of expression of the protein of interest, etc. The expression vectors of the invention may be introduced into the host cells in order to prepare proteins or peptides, including fusion proteins or fusion peptides, which are encoded by the nucleic acids as described herein (e.g. MP proteins, mutated forms of MP proteins, fusion proteins, etc.).

[0110] The recombinant expression vectors of the invention may be designed for expressing MP proteins in prokaryotic or eukaryotic cells. For example, MP genes may be expressed in bacterial cells such as C. glutamicum, insect cells (using Baculovirus expression vectors), yeast cells and other fungal cells (see Romanos, M. A. et al. (1992) “Foreign gene expression in yeast: a review”, Yeast 8: 423-488; van den Hondel, C. A. M. J. J. et al. (1991) “Heterologous gene expression in filamentous fungi” in: More Gene Manipulations in Fungi, J. W. Bennet & L. L. Lasure, editors, pp. 396-428: Academic Press: San Diego; and van den Hondel, C. A. M. J. J. & Punt, P. J. (1991) “Gene transfer systems and vector development for filamentous fungi” in: Applied Molecular Genetics of Fungi, Peberdy, J. F. et al., editors, pp. 1-28, Cambridge University Press: Cambridge), algal and multicellular plant cells (see Schmidt, R. and Willmitzer, L. (1988) “High efficiency Agrobacterium tumefaciens-mediated transformation of Arabidopsis thaliana leaf and cotyledon explants” Plant Cell Rep.: 583-586) or mammalian cells. Suitable host cells are further discussed in Goeddel, Gene Expression Technology: Methods in Enzymology 185, Academic Press, San Diego, Calif. (1990). Alternatively, the recombinant expression vector may be transcribed and translated in vitro, for example by using T7 promoter regulatory sequences and T7 polymerase.

[0111] Proteins are expressed in prokaryotes mainly by using vectors containing constitutive or inducible promoters which control the expression of fusion or nonfusion proteins. Fusion vectors contribute a number of amino acids to a protein encoded therein, usually at the amino terminus of the recombinant protein. These fusion vectors usually have three tasks: 1) enhancing the expression of recombinant protein; 2) increasing the solubility of the recombinant protein; and 3) supporting the purification of the recombinant protein by acting as a ligand in affinity purification. Often a proteolytic cleavage site is introduced into fusion expression vectors at the junction of fusion unit and recombinant protein so that the recombinant protein can be separated from the fusion unit after purifying the fusion protein. These enzymes and their corresponding recognition sequences comprise factor Xa, thrombin and enterokinase.

[0112] Common fusion expression vectors comprise pGEX (Pharmacia Biotech Inc; Smith, D. B. and Johnson, K. S. (1988) Gene 67: 31-40), pMAL (New England Biolabs, Beverly, Mass.) and pRIT 5 (Pharmacia, Piscataway, N.J.), in which glutathione S-transferase (GST), maltose E-binding protein and protein A, respectively, are fused to the recombinant target protein. In one embodiment, the coding sequence of the MP protein is cloned into a pGEX expression vector such that a vector is generated which encodes a fusion protein comprising, from N terminus to C terminus, GST—thrombin cleavage site—protein X. The fusion protein may be purified via affinity chromatography by means of a glutathione-agarose resin. The recombinant MP protein which is not fused to GST may be obtained by cleaving the fusion protein with thrombin.

[0113] Examples of suitable inducible nonfusion E. coli expression vectors include pTrc (Amann et al., (1988) Gene 69: 301-315) and pET 11d (Studier et al. Gene Expression Technology: Methods in Enzymology 185, Academic Press, San Diego, Calif. (1990) 60-89). The target gene expression from the pTrc vector is based on transcription from a hybrid trp-lac fusion promoter by host RNA polymerase. The target gene expression from the pET11d vector is based on transcription from a T7-gn10-lac fusion promoter, which is mediated by a coexpressed viral RNA polymerase (T7 gn1). This viral polymerase is provided in the BL 21 (DE3) or HMS174 (DE3) host strain by a resident λ prophage which harbors a T7 gn1 gene under the transcriptional control of the lacUV 5 promoter.

[0114] One strategy for maximizing expression of the recombinant protein is to express said protein in a host bacterium whose ability to proteolytically cleave said recombinant protein is disrupted (Gottesman, S. Gene Expression Technology: Methods in Enzymology 185, Academic Press, San Diego, Calif. (1990) 119-128). Another strategy is to modify the nucleic acid sequence of the nucleic acid to be inserted into an expression vector such that the individual codons for each amino acid are those which are preferably used in a bacterium selected for expression, such as C. glutamicum (Wada et al. (1992) Nucleic Acids Res. 20: 2111-2118). This modification of the nucleic acid sequences of the invention is carried out by standard techniques of DNA synthesis.

[0115] In a further embodiment, the MP protein expression vector is an expression vector of yeast. Examples of vectors for expression in the yeast S. cerevisiae include pYepSec1 (Baldari et al., (1987) Embo J. 6: 229-234), pMFa (Kurjan and Herskowitz (1982) Cell 30: 933-943), pJRY88 (Schultz et al. (1987) Gene 54: 113-123) and pYES2 (Invitrogen Corporation, San Diego, Calif.). Vectors and methods for constructing vectors which are suitable for use in other fungi such as filamentous fungi include those which are described in detail in: van den Hondel, C. A. M. J. J. & Punt, P. J. (1991) “Gene transfer systems and vector development for filamentous fungi”, in: Applied Molecular Genetics of fungi, J. F. Peberdy et al., editors, pp. 1-28, Cambridge University Press: Cambridge.

[0116] As an alternative, it is possible to express the MP proteins of the invention in insect cells using baculovirus expression vectors. Baculovirus vectors available for the expression of proteins in cultured insect cells (e.g. Sf9 cells) include the pAc series (Smith et al., (1983) Mol. Cell. Biol. 3: 2156-2165) and the pVL series (Lucklow and Summers (1989) Virology 170: 31-39).

[0117] In a further embodiment, the MP proteins of the invention may be expressed in unicellular plant cells (such as algae) or in cells of higher plants (e.g. spermatophytes such as crops). Examples of expression vectors of plants include those which are described in detail in Becker, D., Kemper, E., Schell, J. and Masterson, R. (1992) “New plant binary vectors with selectable markers located proximal to the left border”, Plant Mol. Biol. 20: 1195-1197; and Bevan, M. W. (1984) “Binary Agrobacterium vectors for plant transformation”, Nucl. Acids Res. 12: 8711-8721.

[0118] In another embodiment, a nucleic acid of the invention is expressed in mammalian cells using a mammalian expression vector. Examples of mammalian expression vectors include pCDM8 (Seed, B. (1987) Nature 329:840) and pMT2PC (Kaufman et al. (1987) EMBO J. 6: 187-195). When used in mammalian cells, the control functions of the expression vector are often provided by viral regulatory elements. Commonly used promoters are derived, for example, from polyoma, adenovirus2, cytomegalovirus and simian virus 40. Other suitable expression systems for prokaryotic and eukaryotic cells can be found in Chapters 16 and 17 of Sambrook, J., Fritsch, E. F. and Maniatis, T., Molecular cloning: A Laboratory Manual, 2nd edition, Cold Spring Harbor Laboratory, Cold Spring Harbor Laboratory Press, Cold Spring Harbor, N.Y., 1989.

[0119] In a further embodiment, the recombinant mammalian expression vector may cause expression of the nucleic acid, preferably in a particular cell type (for example, tissue-specific regulatory elements are used for expressing the nucleic acid). Tissue-specific regulatory elements are known in the art. Nonlimiting examples of suitable tissue-specific promoters include the albumin promoter (liver-specific; Pinkert et al. (1987) Genes Dev. 1: 268-277), lymphoid-specific promoters (Calame and Eaton (1988) Adv. Immunol. 43: 235-275), in particular promoters of T-cell receptors (Winoto and Baltimore (1989) EMBO J. 8: 729-733) and immunoglobulins (Banerji et al. (1983) Cell 33: 729-740; Queen and Baltimore (1983) Cell 33: 741-748), neuron-specific promoters (e.g. neurofilament promoter; Byrne and Ruddle (1989) PNAS 86: 5473-5477), pancreas-specific promoters (Edlund et al., (1985) Science 230: 912-916) and mamma-specific promoters (e.g. milk serum promoter; U.S. Pat. No. 4,873,316 and European Patent Application document No. 264 166). Development-regulated promoters, for example the murine hox promoters (Kessel and Gruss (1990) Science 249: 374-379) and the α-fetoprotein promoter (Campes and Tilghman (1989) Genes Dev. 3: 537-546), are likewise included.

[0120] In addition, the invention provides a recombinant expression vector comprising an inventive DNA molecule which has been cloned into the expression vector in antisense direction. This means that the DNA molecule is functionally linked to a regulatory sequence such that an RNA molecule which is antisense to the MP mRNA can be expressed (via transcription of the DNA molecule). It is possible to select regulatory sequences which are functionally bound to a nucleic acid cloned in antisense direction and which control the continuous expression of the antisense RNA molecule in a multiplicity of cell types; for example, it is possible to select viral promoters and/or enhancers or regulatory sequences which control the constitutive tissue-specific or cell type-specific expression of antisense RNA. The antisense expression vector may be in the form of a recombinant plasmid, phagemid or attenuated virus, which produces antisense nucleic acids under the control of a highly effective regulatory region whose activity is determined by the cell type into which the vector is introduced. The regulation of gene expression by means of antisense genes is discussed in Weintraub, H. et al., Antisense RNA as a molecular tool for genetic analysis, Reviews—Trends in Genetics, Vol. 1(1) 1986.

[0121] Another aspect of the invention relates to the host cells into which a recombinant expression vector of the invention has been introduced. The terms “host cell” and “recombinant host cell” are used interchangeably herein. Naturally, these terms relate not only to a particular target cell but also to the progeny or potential progeny of this cell. Since particular modifications may appear in successive generations, due to mutation or environmental factors, this progeny is not necessarily identical with the parental cell but is still included in the scope of the term as used herein.

[0122] A host cell may be a prokaryotic or eukaryotic cell. For example, an MP protein may be expressed in bacterial cells such as C. glutamicum, insect cells, yeast or mammalian cells (such as Chinese hamster ovary (CHO) cells or COS cells). Other suitable host cells are familiar to the skilled worker. Microorganisms which are related to Corynebacterium glutamicum and can be used in a suitable manner as host cells for the nucleic acid and protein molecules of the invention are listed in table 3.

[0123] Conventional transformation or transfection methods can be used to introduce vector DNA into prokaryotic or eukaryotic cells. The terms “transformation” and “transfection”, as used herein, are intended to comprise a multiplicity of methods known in the art for introducing foreign nucleic acid (e.g. DNA) into a host cell, including calcium phosphate or calcium chloride coprecipitation, DEAE-dextran-mediated transfection, lipofection or electroporation. Suitable methods for transformation or transfection of host cells can be found in Sambrook et al. (Molecular Cloning: A Laboratory Manual. 2nd edition Cold Spring Harbor Laboratory, Cold Spring Harbor Laboratory Press, Cold Spring Harbor, N.Y., 1989) and other laboratory manuals.

[0124] In the case of stable transfection of mammalian cells, it is known that, depending on the expression vector used and transfection technique used, only a small proportion of the cells integrate the foreign DNA into their genome. These integrants are usually identified and selected by introducing a gene which encodes a selectable marker (e.g. resistance to antibiotics) together with the gene of interest into the host cells. Preferred selectable markers include those which impart resistance to drugs such as G418, hygromycin and methotrexate. A nucleic acid which encodes a selectable marker may be introduced into a host cell on the same vector that encodes an MP protein or may be introduced on a separate vector. Cells which have been stably transfected with the introduced nucleic acid may be identified by drug selection (for example, cells which have integrated the selectable marker survive, whereas the other cells die).

[0125] A homologously recombined microorganism is generated by preparing a vector which contains at least one MP gene section into which a deletion, addition or substitution has been introduced in order to modify or functionally disrupt the MP gene. Said MP gene is preferably a Corynebacterium glutamicum MP gene, but it is also possible to use a homolog from a related bacterium or even from a mammalian, yeast or insect source. In a preferred embodiment, the vector is designed such that homologous recombination functionally disrupts the endogenous MP gene (i.e. the gene no longer encodes a functional protein; likewise referred to as “knockout” vector). As an alternative, the vector may be designed such that homologous recombination mutates or otherwise modifies the endogenous MP gene which, however, still encodes the functional protein (for example, the regulatory region located upstream may be modified such that thereby the expression of the endogenous MP protein is modified.). The modified MP gene section in the homologous recombination vector is flanked at its 5′ and 3′ ends by additional nucleic acid of the MP gene, which makes possible a homologous recombination between the exogenous MP gene carried by the vector and an endogenous MP gene in a microorganism. The length of the additional flanking MP nucleic acid is sufficient for a successful homologous recombination with the endogenous gene. Usually, the vector contains several kilobases of flanking DNA (both at the 5′ and the 3′ ends) (see, for example, Thomas, K. R. and Capecchi, M. R. (1987) Cell 51: 503 for a description of homologous recombination vectors). The vector is introduced into a microorganism (e.g. by electroporation) and cells in which the introduced MP gene has homologously recombined with the endogenous MP gene are selected using methods known in the art.

[0126] In another embodiment, it is possible to produce recombinant microorganisms which contain selected systems which make possible a regulated expression of the introduced gene. The inclusion of an MP gene under the control of the lac operon in a vector enables, for example, MP gene expression only in the presence of IPTG. These regulatory systems are known in the art.

[0127] A host cell of the invention, such as a prokaryotic or eukaryotic host cell in culture, may be used for producing (i.e. expressing) an MP protein. In addition, the invention provides methods for producing MP proteins by using the host cells of the invention. In one embodiment, the method comprises the cultivation of the host cell of the invention (into which a recombinant expression vector encoding an MP protein has been introduced or in whose genome a gene encoding a wild-type or modified MP protein has been introduced) in a suitable medium until the MP protein has been produced. In a further embodiment, the method comprises isolating the MP proteins from the medium or the host cell.

C. Uses and Methods of the Invention

[0128] The nucleic acid molecules, proteins, fusion proteins, primers, vectors and host cells described herein may be used in one or more of the following methods: identification of C. glutamicum and related organisms, mapping of genomes of organisms related to C. glutamicum, identification and localization of C. glutamicum sequences of interest, evolutionary studies, determination of MP protein regions required for function, modulation of the activity of an MP protein; modulation of the activity of an MP pathway; and modulation of the cellular production of a compound of interest, such as a fine chemical. The MP nucleic acid molecules of the invention have a multiplicity of uses. First, they may be used for identifying an organism as Corynebacterium glutamicum or close relatives thereof. They may also be used for identifying C. glutamicum or a relative thereof in a mixed population of microorganisms. The invention provides the nucleic acid sequences of a number of C. glutamicum genes. Probing the extracted genomic DNA of a culture of a uniform or mixed population of microorganisms under stringent conditions with a probe which comprises a region of a C. glutamicum gene which is unique in this organism makes it possible to determine whether said organism is present. Although Corynebacterium glutamicum itself is nonpathogenic, it is related to pathogenic species such as Corynebacterium diphtheriae. The detection of such an organism is of substantial clinical importance.

[0129] The nucleic acid and protein molecules of the invention may serve as markers for specific regions of the genome. This is useful not only for mapping the genome but also for functional studies of C. glutamicum proteins. The genomic region to which a particular C. glutamicum DNA-binding protein binds may be identified, for example, by cleaving the C. glutamicum genome and incubating the fragments with the DNA-binding protein. Those fragments which bind the protein may additionally be probed with the nucleic acid molecules of the invention, preferably by using readily detectable labels; binding of such a nucleic acid molecule to the genomic fragment makes it possible to locate the fragment on the map of the C. glutamicum genome, and carrying out this process several times using different enzymes facilitates rapid determination of the nucleic acid sequence to which the protein binds. Moreover, the nucleic acid molecules of the invention may be sufficiently homologous to the sequences of related species for these nucleic acid molecules to serve as markers for constructing a genomic map in related bacteria such as Brevibacterium lactofermentum.

[0130] The MP nucleic acid molecules of the invention are likewise suitable for evolutionary studies and protein structure studies. Many prokaryotic and eukaryotic cells utilize the metabolic processes in which the molecules of the invention are involved; by comparing the sequences of the nucleic acid molecules of the invention with those sequences which encode similar enzymes from other organisms, it is possible to determine the degree of evolutionary relationship of said organisms. Accordingly, such a comparison makes it possible to determine which sequence regions are conserved and which are not, and this may be helpful in determining those regions of the protein which are essential for enzyme function. This type of determination is valuable for protein engineering studies and may give an indication as to which protein can tolerate mutagenesis without losing its function.

[0131] Manipulation of the MP nucleic acid molecules of the invention may cause the production of MP proteins with functional differences to wild-type MP proteins. These proteins can be improved with respect to their efficiency or activity, can be present in the cell in larger amounts than normal or can be weakened with respect to their efficiency or activity.

[0132] These changes in activity may be such that the yield, production and/or efficiency of production of one or more fine chemicals from C. glutamicum are improved. By optimizing the activity of an MP protein which activates transcription or translation of a gene encoding a protein of the biosynthesis of a fine chemical of interest or by influencing or deleting the activity of an MP protein which represses transcription or translation of such a gene, it is possible to increase the activity or activity rate of this biosynthetic pathway, owing to the presence of increased amounts of, for example, a limiting enzyme. Correspondingly, it is possible, by modifying the activity of an MP protein such that it constitutively inactivates posttranslationally a protein which is involved in the degradation pathway of a fine chemical of interest or by modifying the activity of an MP protein such that it constitutively represses transcription or translation of such a gene, to increase the yield and/or production rate of said fine chemical from the cell, owing to the reduced degradation of the compound.

[0133] Modulating the activity of one or more MP proteins makes it possible to indirectly stimulate the production or to improve the production rate of one or more fine chemicals from the cell, owing to the linkage of various metabolic pathways. It is possible, for example, by increasing the yield, production and/or efficiency of production by activating the expression of one or more enzymes in lysine biosynthesis, to increase simultaneously the expression of other compounds such as other amino acids which the cell usually needs in larger quantities when larger quantities of lysine are required. It is also possible to modify the metabolic regulation in the entire cell such that the cell under the environmental conditions of a fermentation culture (in which the supply of nutrients and oxygen may be poor and possibly toxic waste products may be present in large quantities in the environment) may have improved growth or replication. Thus it is possible, for example, to improve the growth and propagation of the cells in culture, even if the growth conditions are suboptimal, by mutagenizing an MP protein which suppresses the synthesis of molecules required for cell membrane production in reaction to high levels of waste products in the extracellular medium (in order to block cell growth and cell division in suboptimal growth conditions) such that said protein is no longer capable of repressing said synthesis. Such increased growth or such increased viability should likewise increase the yields and/or production rate of a fine chemical of interest from a fermentative culture, owing to the relatively large number of cells producing this compound in the culture.

[0134] The abovementioned strategies for the mutagenesis of MP proteins, which ought to increase the yields of a fine chemical of interest in C. glutamicum, are not intended to be limiting; variations of these strategies are quite obvious to the skilled worker. These strategies and the mechanisms disclosed herein make it possible to use the nucleic acid and protein molecules of the invention in order to generate C. glutamicum or related bacterial strains expressing mutated MP nucleic acid and protein molecules so as to improve the yield, production and/or efficiency of production of a compound of interest. The compound of interest may be a natural C. glutamicum product which comprises the end products of the biosynthetic pathways and intermediates of naturally occurring metabolic pathways and also molecules which do not naturally occur in the C. glutamicum metabolism but are produced by a C. glutamicum strain of the invention.

[0135] The following examples, which are not to be understood as being limiting, further illustrate the present invention. The contents of all references, patent applications, patents and published patent applications cited in this patent application are hereby incorporated by way of reference.

### EXAMPLES

### Example 1

### Preparation of Total Genomic DNA from Corynebacterium glutamicum ATCC13032

[0136] A Corynebacterium glutamicum (ATCC 13032) culture was cultivated with vigorous shaking in BHI medium (Difco) at 30° C. overnight. The cells were harvested by centrifugation, the supernatant was discarded and the cells were resuspended in 5 ml of buffer I (5% of the original culture volume—all volumes stated have been calculated for a culture volume of 100 ml). Composition of buffer I: 140.34 g/l sucrose, 2.46 g/l MgSO₄.7H₂O, 10 ml/l KH₂PO₄ solution (100 g/l, adjusted to pH 6.7 with KOH), 50 ml/l M12 concentrate (10 g/l (NH₄)₂SO₄, 1 g/l NaCl, 2 g/l MgSO₄.7H₂O, 0.2 g/l CaCl₂, 0.5 g/l yeast extract (Difco), 10 ml/l trace element mixture (200 mg/l FeSO₄.H₂O, 10 mg/l ZnSO₄.7H₂O, 3 mg/l MnCl₂.4H₂O, 30 mg/l H₃BO₃, 20 mg/l CoCl₂.6H₂O, 1 mg/l NiCl₂.6H₂O, 3 mg/l Na₂MoO₄.2H₂O), 500 mg/l complexing agent (EDTA or citric acid), 100 ml/l vitamin mixture (0.2 ml/l biotin, 0.2 mg/l folic acid, 20 mg/l p-aminobenzoic acid, 20 mg/l riboflavin, 40 mg/l Ca pantothenate, 140 mg/l nicotinic acid, 40 mg/l pyridoxal hydrochloride, 200 mg/l myoinositol). Lysozyme was added to the suspension at a final concentration of 2.5 mg/ml. After incubation at 37° C. for approx. 4 h, the cell wall was degraded and the protoplasts obtained were harvested by centrifugation. The pellet was washed once with 5 ml of buffer I and once with 5 ml of TE buffer (10 mM Tris-HCl, 1 mM EDTA, pH 8). The pellet was resuspended in 4 ml of TE buffer, and 0.5 ml of SDS solution (10%) and 0.5 ml of NaCl solution (5 M) were added. After addition of proteinase K at a final concentration of

[0137] 200 μg/ml, the suspension was incubated at 37° C. for approx. 18 h. The DNA was purified via extraction with phenol, phenol/chloroform/isoamyl alcohol and chloroform/isoamyl alcohol by means of standard methods. The DNA was then precipitated by addition of 1/50 volume of 3 M sodium acetate and 2 volumes of ethanol, subsequent incubation at −20° C. for 30 min and centrifugation at 12 000 rpm in a high-speed centrifuge using an SS34 rotor (Sorvall) for 30 min. The DNA was dissolved in 1 ml of TE buffer containing 20 μg/ml RNase A and dialyzed against

1000 ml of TE buffer at 4° C. for at least 3 h. The buffer was exchanged 3 times during this period. 0.4 ml of 2 M LiCl and

[0138] 0.8 ml of ethanol were added to 0.4 ml aliquots of the dialyzed DNA solution. After incubation at −20° C. for 30 min, the DNA was collected by centrifugation (13 000 rpm, Biofuge Fresco, Heraeus, Hanau, Germany). The DNA pellet was dissolved in TE buffer. It was possible to use DNA prepared by this method for all purposes, including Southern blotting and constructing genomic libraries.

### Example 2

### Construction of Genomic Corynebacterium glutamicum (ATCC13032) Banks in Escherichia coli

[0139] Starting from DNA prepared as described in example 1, cosmid and plasmid banks were prepared according to known and well-established methods (see, for example, Sambrook, J. et al. (1989) “Molecular Cloning: A Laboratory Manual”. Cold Spring Harbor Laboratory Press or Ausubel, F. M. et al. (1994) “Current Protocols in Molecular Biology”, John Wiley & Sons).

[0140] It was possible to use any plasmid or cosmid. Particular preference was given to using the plasmids pBR322 (Sutcliffe, J. G. (1979) Proc. Natl. Acad. Sci. USA, 75: 3737-3741); pACYC177 (Change & Cohen (1978) J. Bacteriol. 134: 1141-1156); pBS series plasmids (pBSSK+, pBSSK− and others; Stratagene, La Jolla, USA) or cosmids such as SuperCos1 (Stratagene, La Jolla, USA) or Lorist6 (Gibson, T. J. Rosenthal, A., and Waterson, R. H. (1987) Gene 53: 283-286).

### Example 3

### DNA Sequencing and Functional Computer Analysis

[0141] Genomic banks as described in example 2 were used for DNA sequencing according to standard methods, in particular the chain termination method using ABI377 sequencers (see, for example, Fleischman, R. D. et al. (1995) “Whole-genome Random Sequencing and Assembly of Haemophilus Influenzae Rd.”, Science 269; 496-512). Sequencing primers having the following nucleotide sequences were used: 5′-GGAAACAGTATGACCATG-3′ or 5′-GTAAAACGACGGCCAGT-3′.

### Example 4

### In Vivo Mutagenesis

[0142] In vivo mutagenesis of Corynebacterium glutamicum may be carried out by passing a plasmid (or other vector) DNA through E. coli or other microorganisms (e.g. Bacillus spp. or yeasts such as Saccharomyces cerevisiae) which cannot maintain the integrity of their genetic information. Common mutator strains contain mutations in the genes for the DNA repair system (e.g., mutHLS, mutD, mutT, etc., for comparison see Rupp, W. D. (1996) DNA repair mechanisms in Escherichia coli and Salmonella, pp. 2277-2294, ASM: Washington). These strains are known to the skilled worker. The use of these strains is illustrated, for example, in Greener, A. and Callahan, M. (1994) Strategies 7; 32-34.

### Example 5

### DNA Transfer Between Escherichia coli and Corynebacterium glutamicum

[0143] A plurality of Corynebacterium and Brevibacterium species contain endogenous plasmids (such as, for example, pHM1519 or pBL1) which replicate autonomously (for a review see, for example, Martin, J. F. et al. (1987) Biotechnology 5: 137-146). Shuttle vectors for Escherichia coli and Corynebacterium glutamicum can be constructed readily by means of standard vectors for E. coli (Sambrook, J. et al., (1989), “Molecular Cloning: A Laboratory Manual”, Cold Spring Harbor Laboratory Press or Ausubel, F. M. et al. (1994) “Current Protocols in Molecular Biology”, John Wiley & Sons), to which an origin of replication for and a suitable marker from Corynebacterium glutamicum are added. Such origins of replication are preferably taken from endogenous plasmids which have been isolated from Corynebacterium and Brevibacterium species. Particularly useful transformation markers for these species are genes for kanamycin resistance (such as those derived from the Tn5 or the Tn903 transposon) or for chloramphenicol resistance (Winnacker, E. L. (1987) “From Genes to Clones—Introduction to Gene Technology”, VCH, Weinheim). There are numerous examples in the literature for preparing a large multiplicity of shuttle vectors which are replicated in E. coli and C. glutamicum and which can be used for various purposes, including the overexpression of genes (see, for example, Yoshihama, M. et al. (1985) J. Bacteriol. 162: 591-597, Martin, J. F. et al., (1987) Biotechnology, 5: 137-146 and Eikmanns, B. J. et al. (1992) Gene 102: 93-98).

[0144] Standard methods make it possible to clone a gene of interest into one of the above-described shuttle vectors and to introduce such hybrid vectors into Corynebacterium glutamicum strains. C. glutamicum can be transformed via protoplast transformation (Kastsumata, R. et al., (1984) J. Bacteriol. 159, 306-311), electroporation (Liebl, E. et al., (1989) FEMS Microbiol. Letters, 53: 399-303) and, in cases in which specific vectors are used, also via conjugation (as described, for example, in Schafer, A., et al. (1990) J. Bacteriol. 172: 1663-1666). Likewise, it is possible to transfer the shuttle vectors for C. glutamicum to E. coli by preparing plasmid DNA from C. glutamicum (by means of standard methods known in the art) and transforming it into E. coli. This transformation step can be carried out using standard methods but advantageously an Mcr-deficient E. coli strain such as NM522 (Gough & Murray (1983) J. Mol. Biol. 166: 1-19) is used.

### Example 6

### Determination of the Expression of the Mutated Protein

[0145] The observations of the activity of a mutated protein in a transformed host cell are based on the fact that the mutated protein is expressed in a similar manner and in similar quantity to the wild-type protein. A suitable method for determining the amount of transcription of the mutated gene (an indication of the amount of mRNA available for translation of the gene product) is to carry out a Northern blot (see, for example, Ausubel et al., (1988) Current Protocols in Molecular Biology, Wiley: New York), with a primer which is designed such that it binds to the gene of interest being provided with a detectable (usually radioactive or chemiluminescent) label such that—when the total RNA of a culture of the organism is extracted, fractionated on a gel, transferred to a stable matrix and incubated with this probe—binding and binding quantity of the probe indicate the presence and also the amount of mRNA for said gene. This information is an indicator of the extent to which the mutated gene has been transcribed. Total cell RNA can be isolated from Corynebacterium glutamicum by various methods known in the art, as described in Bormann, E. R. et al., (1992) Mol. Microbiol. 6: 317-326.

[0146] The presence or the relative amount of protein translated from said mRNA can be determined by using standard techniques such as Western blot (see, for example, Ausubel et al. (1988) “Current Protocols in Molecular Biology”, Wiley, New York). In this method, total cell proteins are extracted, separated by gel electrophoresis, transferred to a matrix such as nitrocellulose and incubated with a probe, for example an antibody, which binds specifically to the protein of interest. This probe is usually provided with a chemiluminescent or calorimetric label which can be readily detected. The presence and the observed amount of label indicate the presence and the amount of the desired mutant protein in the cell.

### Example 7

### Growth of Genetically Modified Corynebacterium glutamicum—Media and Cultivation Conditions

[0147] Genetically modified corynebacteria are cultivated in synthetic or natural growth media. A number of different growth media for corynebacteria are known and readily available (Lieb et al. (1989) Appl. Microbiol. Biotechnol. 32: 205-210; von der Osten et al. (1998) Biotechnology Letters 11: 11-16; Patent DE 4 120 867; Liebl (1992) “The Genus Corynebacterium”, in: The Procaryotes, Vol. II, Balows, A., et al., editors Springer-Verlag). These media are composed of one or more carbon sources, nitrogen sources, inorganic salts, vitamins and trace elements. Preferred carbon sources are sugars such as mono-, di- or polysaccharides. Examples of very good carbon sources are glucose, fructose, mannose, galactose, ribose, sorbose, ribulose, lactose, maltose, sucrose, raffinose, starch and cellulose. Sugars may also be added to the media via complex compounds such as molasses or other byproducts from sugar refining. It may also be advantageous to add mixtures of various carbon sources. Other possible carbon sources are alcohols and organic acids, such as methanol, ethanol, acetic acid or lactic acid. Nitrogen sources are usually organic or inorganic nitrogen compounds or materials containing these compounds. Examples of nitrogen sources include ammonia gas and ammonium salts such as NH₄Cl or (NH₄)₂SO₄, NH₄OH, nitrates, urea, amino acids and complex nitrogen sources such as corn steep liquor, soya meal, soya protein, yeast extracts, meat extracts and others.

[0148] Inorganic salt compounds which may be present in the media include the chloride, phosphorus or sulfate salts of calcium, magnesium, sodium, cobalt, molybdenum, potassium, manganese, zinc, copper and iron. Chelating agents may be added to the medium in order to keep the metal ions in solution. Particularly suitable chelating agents include dihydroxyphenols such as catechol or protocatechuate and organic acids such as citric acid. The media usually also contain other growth factors such as vitamins or growth promoters, examples of which include biotin, riboflavin, thiamin, folic acid, nicotinic acid, pantothenate and pyridoxine. Growth factors and salts are frequently derived from complex media components such as yeast extract, molasses, corn steep liquor and the like. The exact composition of the media heavily depends on the particular experiment and is decided upon individually for each case. Information on the optimization of media can be found in the textbook “Applied Microbiol. Physiology, A Practical Approach” (editors P. M. Rhodes, P. F. Stanbury, IRL Press (1997) pp. 53-73, ISBN 0 19 963577 3). Growth media can also be obtained from commercial suppliers, for example Standard 1 (Merck) or BHI (brain heart infusion, DIFCO) and the like.

[0149] All media components are sterilized, either by heat (20 min at 1.5 bar and 121° C.) or by sterile filtration. The components may be sterilized either together or, if required, separately. All media components may be present at the start of the cultivation or added continuously or batchwise, as desired.

[0150] The cultivation conditions are defined separately for each experiment. The temperature should be between 15° C. and 45° C. and may be kept constant or may be altered during the experiment. The pH of the medium should be in the range from 5 to 8.5, preferably around 7.0, and may be maintained by adding buffers to the media. An example of a buffer for this purpose is a potassium phosphate buffer. Synthetic buffers such as MOPS, HEPES, ACES, etc. may be used alternatively or simultaneously. Addition of NaOH or NH₄OH can also keep the pH constant during cultivation. If complex media components such as yeast extract are used, the demand for additional buffers decreases, since many complex compounds have a high buffer capacity. In the case of using a fermenter for cultivating microorganisms, the pH may also be regulated using gaseous ammonia.

[0151] The incubation period is usually in a range from several hours to several days. This time is selected such that the maximum amount of product accumulates in the broth. The growth experiments disclosed may be carried out in a multiplicity of containers such as microtiter plates, glass tubes, glass flasks or glass or metal fermenters of different sizes. For the screening of a large number of clones, the microorganisms should be grown in microtiter plates, glass tubes or shaker flasks either with or without baffles. Preference is given to using 100 ml shaker flasks which are filled with 10% (based on volume) of the required growth medium. The flasks should be shaken on an orbital shaker (amplitude 25 mm) at a speed in the range of 100-300 rpm. Losses due to evaporation can be reduced by maintaining a humid atmosphere; alternatively, the losses due to evaporation should be corrected mathematically.

[0152] If genetically modified clones are investigated, an unmodified control clone or a control clone containing the basic plasmid without insert should also be assayed. The medium is inoculated to an OD₆₀₀ of 0.5-1.5, with cells being used which have been grown on agar plates such as CM plates (10 g/l glucose, 2.5 g/l NaCl, 2 μl urea, 10 g/l polypeptone, 5 g/l yeast extract, 5 g/l meat extract, 22 μl agar pH 6.8 with 2 M NaOH) which have been incubated at 30° C. The media are inoculated either by introducing a saline solution of C. glutamicum cells from CM plates or by adding a liquid preculture of said bacterium.

### Example 8

### In Vitro Analysis of the Function of Mutated Proteins

[0153] The determination of the activities and kinetics of enzymes is well known in the art. Experiments for determining the activity of a particular modified enzyme must be adapted to the specific activity of the wild-type enzyme, and this is within the capabilities of the skilled worker. Overviews regarding enzymes in general and also specific details concerning the structure, kinetics, principles, methods, applications and examples of the determination of many enzyme activities can be found, for example, in the following references: Dixon, M., and Webb, E. C: (1979) Enzymes, Longmans, London; Fersht (1985) Enzyme Structure and Mechanism, Freeman, New York; Walsh (1979) Enzymatic Reaction Mechanisms. Freeman, San Francisco; Price, N.C., Stevens, L. (1982) Fundamentals of Enzymology. Oxford Univ. Press: Oxford; Boyer, P. D: editors (1983) The Enzymes, 3rd edition, Academic Press, New York; Bisswanger, H. (1994) Enzymkinetik, 2nd edition VCH, Weinheim (ISBN 3527300325); Bergmeyer, H. U., Bergmeyer, J., Graβl, M. editors (1983-1986) Methods of Enzymatic Analysis, 3rd edition, Vol. I-XII, Verlag Chemie: Weinheim; and Ullmann's Encyclopedia of Industrial Chemistry (1987) Vol. A9, “Enzymes”, VCH, Weinheim, pp. 352-363.

[0154] The activities of proteins binding to DNA can be measured by many well-established methods such as DNA bandshift assays (which are also referred to as gel retardation assays). The action of these proteins on the expression of other molecules can be measured using reporter gene assays (as described in Kolmar, H. et al., (1995) EMBO J. 14: 3895-3904 and in references therein). Reporter gene assay systems are well known and established for applications in prokaryotic and eukaryotic cells, with enzymes such as beta-galactosidase, green fluorescent protein and several other enzymes being used.

[0155] The activity of membrane transport proteins can be determined according to the techniques described in Gennis, R. B. (1989) “Pores, Channels and Transporters”, in Biomembranes, Molecular Structure and Function, Springer: Heidelberg, pp. 85-137; 199-234; and 270-322.

### Example 9

### Analysis of the Influence of Mutated Protein on the Production of the Product of Interest

[0156] The effect of the genetic modification in C. glutamicum on the production of a compound of interest (such as an amino acid) can be determined by growing the modified microorganisms under suitable conditions (such as those described above) and testing the medium and/or the cellular components for increased production of the product of interest (i.e. an amino acid). Such analytical techniques are well known to the skilled worker and include spectroscopy, thin-layer chromatography, various types of staining methods, enzymic and microbiological methods and analytical chromatography such as high performance liquid chromatography (see, for example, Ullmann, Encyclopedia of Industrial Chemistry, Vol. A2, pp. 89-90 and pp. 443-613, VCH: Weinheim (1985); Fallon, A., et al., (1987) “Applications of HPLC in Biochemistry” in: Laboratory Techniques in Biochemistry and Molecular Biology, Vol. 17; Rehm et al. (1993) Biotechnology, Vol. 3, Chapter III: “Product recovery and purification”, pp. 469-714, VCH: Weinheim; Belter, P. A. et al. (1988) Bioseparations: downstream processing for Biotechnology, John Wiley and Sons; Kennedy, J. F. and Cabral, J. M. S. (1992) Recovery processes for biological Materials, John Wiley and Sons; Shaeiwitz, J. A. and Henry, J. D. (1988) Biochemical Separations, in Ullmann's Encyclopedia of Industrial Chemistry, Vol. B3; Chapter 11, pp. 1-27, VCH: Weinheim; and Dechow, F. J. (1989) Separation and purification techniques in biotechnology, Noyes Publications).

[0157] In addition to measuring the end product of the fermentation, it is likewise possible to analyze other components of the metabolic pathways, which are used for producing the compound of interest, such as intermediates and byproducts, in order to determine the overall productivity of the organism, the yield and/or the efficiency of production of the compound. The analytical methods include measuring the amounts of nutrients in the medium (for example sugars, hydrocarbons, nitrogen sources, phosphate and other ions), measuring biomass composition and growth, analyzing the production of common metabolites from biosynthetic pathways and measuring gases generated during fermentation. Standard methods for these measurements are described in Applied Microbial Physiology; A Practical Approach, P. M. Rhodes and P. F. Stanbury, editors IRL Press, pp. 103-129; 131-163 and 165-192 (ISBN: 0199635773) and the references therein.

### Example 10

### Purification of the Product of Interest from a C. glutamicum Culture

[0158] The product of interest may be obtained from C. glutamicum cells or from the supernatant of the above-described culture by various methods known in the art. If the product of interest is not secreted by the cells, the cells may be harvested from the culture by slow centrifugation, and the cells may be lyzed by standard techniques such as mechanical force or ultrasonication. The cell debris is removed by centrifugation and the supernatant fraction which contains the soluble proteins is obtained for further purification of the compound of interest. If the product is secreted by the C. glutamicum cells, the cells are removed from the culture by slow centrifugation and the supernatant fraction is retained for further purification.

[0159] The supernatant fraction from both purification methods is subjected to chromatography using a suitable resin, and either the molecule of interest is retained on the chromatography resin while many contaminants in the sample are not or the contaminants remain on the resin while the sample does not. If necessary, these chromatography steps can be repeated using the same or different chromatography resins. The skilled worker is familiar with the selection of suitable chromatography resins and the most effective application for a particular molecule to be purified. The purified product may be concentrated by filtration or ultrafiltration and stored at a temperature at which product stability is highest.

[0160] In the art, many purification methods are known which are not limited to the above purification method and which are described, for example, in Bailey, J. E. & Ollis, D. F. Biochemical Engineering Fundamentals, McGraw-Hill: New York (1986).

[0161] The identity and purity of the isolated compounds can be determined by standard techniques of the art. These techniques comprise high performance liquid chromatography (HPLC), spectroscopic methods, coloring methods, thin-layer chromatography, NIRS, enzyme assays or microbiological assays. These analytical methods are compiled in: Patek et al. (1994) Appl. Environ. Microbiol. 60: 133-140; Malakhova et al. (1996) Biotekhnologiya 11: 27-32; and Schmidt et al. (1998) Bioprocess Engineer. 19: 67-70. Ulmann's Encyclopedia of Industrial Chemistry (1996) Vol. A27, VCH: Weinheim, pp. 89-90, pp. 521-540, pp. 540-547, pp. 559-566, pp. 575-581 and pp. 581-587; Michal, G. (1999) Biochemical Pathways: An Atlas of Biochemistry and Molecular Biology, John Wiley and Sons; Fallon, A. et al. (1987) Applications of HPLC in Biochemistry in: Laboratory Techniques in Biochemistry and Molecular Biology, Vol. 17.

Equivalents

[0162] The skilled worker knows, or can identify by using simply routine methods, a large number of equivalents of the specific embodiments of the invention. These equivalents are intended to be included in the patent claims below.

[0163] The information in table 1 and table 2 is to be understood as follows:

[0164] In column 1, “DNA ID”, the relevant number refers in each case to the SEQ ID NO of the enclosed sequence listing. Consequently, “5” in column “DNA ID” is a reference to SEQ ID NO:5.

[0165] In column 2, “AA ID”, the relevant number refers in each case to the SEQ ID NO of the enclosed sequence listing. Consequently, “6” in column “AA ID” is a reference to SEQ ID NO:6.

[0166] In column 3, “Identification”, an unambiguous internal name for each sequence is listed.

[0167] In column 4, “AA position”, the relevant number refers in each case to the amino acid position of the polypeptide sequence “AA ID” in the same row. Consequently, “26” in column “M position” is amino acid position 26 of the polypeptide sequence indicated accordingly. Position counting starts at the N terminus with +1.

[0168] In column 5, “AA wild type”, the relevant letter refers in each case to the amino acid, displayed in the one-letter code, at the position in the corresponding wild-type strain, which is indicated in column 4.

[0169] In column 6, “AA mutant”, the relevant letter refers in each case to the amino acid, displayed in the one-letter code, at the position in the corresponding mutant strain, which is indicated in column 4.

[0170] In column 7, “Function”, the physiological function of the corresponding polypeptide sequence is listed.

[0171] Columns 4, 5 and 6 describe at least one mutation, in the case of some sequences also several mutations, for an MP protein with a particular function (column 7) and a particular starting amino acid sequence (column 2). Said several mutations always refer to the nearest starting amino acid sequence, in each case listed at the top (column 2). The term “at least one of the amino acid positions” of a particular amino acid sequence preferably means at least one of the mutations described for this amino acid sequence in column 4, 5 and 6.

[0172] One-Letter Code of the Proteinogenic Amino Acids:

A Alanine

C Cysteine

D Aspartic acid

E Glutamic acid

F Phenylalanine

G Glycine

H Histidine

I Isoleucine

K Lysine

L Leucine

M Methionine

N Asparagine

P Proline

Q Glutamine

R Arginine

S Serine

T Threonine

V Valine

W Tryptophan

[0173] Y Tyrosine

TABLE 1
MP proteins of the invention

| Column 1 | Column 2 | | Column 4 | Column 5 | Column 6 | |
|---|---|---|---|---|---|---|
| DNA | AA | Column 3 | AA | AA | AA | Column 7 |
| ID | ID | Identification | position | wild type | mutant | Function |
| 1 | 2 | RXA00149K | 85 | T | S | Methylmalonyl-CoA mutase |
| | | | 166 | T | A | Methylmalonyl-CoA mutase |
| | | | 174 | F | P | Methylmalonyl-CoA mutase |
| | | | 350 | D | G | Methylmalonyl-CoA mutase |
| | | | 436 | A | T | Methylmalonyl-CoA mutase |
| | | | 538 | A | S | Methylmalonyl-CoA mutase |
| 3 | 4 | RXA00157E | 26 | T | A | Invasin 1 |
| | | | 247 | S | T | Invasin 1 |
| | | | 255 | G | E | Invasin 1 |
| | | | 336 | T | A | Invasin 1 |
| | | | 342 | A | T | Invasin 1 |
| | | | 395 | A | V | Invasin 1 |
| | | | 448 | T | A | Invasin 1 |
| | | | 456 | S | N | Invasin 1 |
| | | | 457 | N | D | Invasin 1 |
| 5 | 6 | RXA00157K | 217 | S | T | Invasin 1 |
| | | | 225 | G | E | Invasin 1 |
| | | | 306 | T | A | Invasin 1 |
| | | | 312 | A | T | Invasin 1 |
| | | | 365 | A | V | Invasin 1 |
| | | | 418 | T | A | Invasin 1 |
| 5 | 6 | RXA00157K | 426 | S | N | Invasin 1 |
| | | | 427 | N | D | Invasin 1 |
| | | | 60 | V | I | Invasin 1 |
| | | | 129 | G | R | Invasin 1 |
| | | | 419 | G | D | Invasin 1 |
| | | | 424 | S | F | Invasin 1 |
| | | | 560 | S | F | Invasin 1 |
| 7 | 8 | RXA00330W | 69 | G | R | Threonine synthase |
| 9 | 10 | RXA00683W | 95 | D | E | PEP synthase |
| | | | 119 | V | I | PEP synthase |
| | | | 348 | I | T | PEP synthase |
| 11 | 12 | RXA00783E | 2 | K | E | Succinyl-CoA synthetase |
| | | | 13 | D | G | Succinyl-CoA synthetase |
| | | | 66 | G | E | Succinyl-CoA synthetase |
| | | | 112 | N | D | Succinyl-CoA synthetase |
| | | | 171 | T | I | Succinyl-CoA synthetase |
| | | | 189 | T | A | Succinyl-CoA synthetase |
| | | | 224 | D | G | Succinyl-CoA synthetase |
| | | | 334 | Q | H | Succinyl-CoA synthetase |
| | | | 364 | G | D | Succinyl-CoA synthetase |
| 13 | 14 | RXA00783K | 40 | G | E | Succinyl-CoA synthetase |
| | | | 86 | N | D | Succinyl-CoA synthetase |
| | | | 145 | T | I | Succinyl-CoA synthetase |
| | | | 163 | T | A | Succinyl-CoA synthetase |
| | | | 198 | D | G | Succinyl-CoA synthetase |
| 13 | 14 | RXA00783K | 308 | Q | H | Succinyl-CoA synthetase |
| | | | 338 | G | D | Succinyl-CoA synthetase |
| | | | 18 | P | S | Succinyl-CoA synthetase |
| | | | 166 | A | T | Succinyl-CoA synthetase |
| 15 | 16 | RXA00969K | 104 | V | I | Homoserine dehydrogenase |
| | | | 116 | T | I | Homoserine dehydrogenase |
| 17 | 18 | RCGL01443K | 11 | S | A | Transcriptional regulator |
| | | | 140 | N | K | Transcriptional regulator |
| | | | 228 | F | M | Transcriptional regulator |
| 19 | 20 | RXA00999K | 329 | V | M | 6-Phosphogluconate dehydrogenase |
| 21 | 22 | RXA01093W | 329 | S | A | Pyruvate kinase |
| | | | 436 | A | T | Pyruvate kinase |
| 23 | 24 | RXA01244W | 178 | D | E | Phosphoenolpyruvate protein phosphotransferase |
| | | | 384 | E | K | Phosphoenolpyruvate protein phosphotransferase |
| 25 | 26 | RXA01434E | 61 | P | L | Virulence Factor MVIN |
| | | | 515 | N | K | Virulence Factor MVIN |
| | | | 580 | F | I | Virulence Factor MVIN |
| | | | 581 | V | I | Virulence Factor MVIN |
| | | | 607 | L | M | Virulence Factor MVIN |
| | | | 626 | E | Q | Virulence Factor MVIN |
| | | | 640 | A | S | Virulence Factor MVIN |
| | | | 743 | H | Y | Virulence Factor MVIN |
| | | | 1080 | V | M | Virulence Factor MVIN |
| | | | 1088 | R | H | Virulence Factor MVIN |
| 27 | 28 | RXA01434K | 35 | P | L | Virulence Factor MVIN |
| | | | 489 | N | K | Virulence Factor MVIN |
| | | | 554 | F | I | Virulence Factor MVIN |
| | | | 555 | V | I | Virulence Factor MVIN |
| | | | 581 | L | M | Virulence Factor MVIN |
| | | | 600 | E | Q | Virulence Factor MVIN |
| | | | 614 | A | S | Virulence Factor MVIN |
| | | | 717 | H | Y | Virulence Factor MVIN |
| | | | 1054 | V | M | Virulence Factor MVIN |
| | | | 1062 | R | H | Virulence Factor MVIN |
| | | | 931 | S | F | Virulence Factor MVIN |
| | | | 986 | P | S | Virulence Factor MVIN |
| 29 | 30 | RXA02056E | 4 | T | I | 2-Oxoglutarate dehydrogenase |
| | | | 64 | T | A | 2-Oxoglutarate dehydrogenase |
| | | | 102 | D | A | 2-Oxoglutarate dehydrogenase |
| | | | 258 | A | T | 2-Oxoglutarate dehydrogenase |
| | | | 398 | A | T | 2-Oxoglutarate dehydrogenase |
| | | | 987 | I | V | 2-Oxoglutarate dehydrogenase |
| | | | 1113 | N | D | 2-Oxoglutarate dehydrogenase |
| 31 | 32 | RXA02056K | 20 | T | I | 2-Oxoglutarate dehydrogenase |
| | | | 80 | T | A | 2-Oxoglutarate dehydrogenase |
| | | | 118 | D | A | 2-Oxoglutarate dehydrogenase |
| | | | 274 | A | T | 2-Oxoglutarate dehydrogenase |
| | | | 414 | A | T | 2-Oxoglutarate dehydrogenase |
| | | | 1075 | P | L | 2-Oxoglutarate dehydrogenase |
| 31 | 32 | RXA02056K | 1137 | A | V | 2-Oxoglutarate dehydrogenase |
| 33 | 34 | RXA02063E | 394 | Q | R | Glucose 1-phosphate adenylyl tranferase |
| 35 | 36 | RXA02063W | 386 | Q | R | Glucose 1-phosphate adenylyl tranferase |
| | | | 129 | G | D | Glucose 1-phosphate adenylyl tranferase |
| 37 | 38 | RXA02082K | 156 | E | D | SMC2 |
| | | | 316 | A | T | SMC2 |
| | | | 349 | T | A | SMC2 |
| | | | 682 | V | A | SMC2 |
| | | | 832 | Q | H | SMC2 |
| 39 | 40 | RXA02016W | 20 | T | S | Nitrate reductase |
| | | | 49 | A | T | Nitrate reductase |
| | | | 58 | N | H | Nitrate reductase |
| | | | 59 | T | A | Nitrate reductase |
| | | | 131 | S | I | Nitrate reductase |
| | | | 166 | N | D | Nitrate reductase |
| | | | 317 | A | S | Nitrate reductase |
| 41 | 42 | RXA02149W | 63 | G | D | Hexokinase |
| | | | 99 | N | D | Hexokinase |
| 43 | 44 | RXA02206E | 114 | A | S | Oxidoreductase |
| | | | 126 | A | V | Oxidoreductase |
| 45 | 46 | RXA02206K | 74 | A | S | Oxidoreductase |
| | | | 86 | A | V | Oxidoreductase |
| | | | 33 | G | D | Oxidoreductase |
| | | | 74 | A | T | Oxidoreductase |
| | | | 274 | R | C | Oxidoreductase |
| 47 | 48 | RXA02299W | 65 | G | R | Aspartate 1-decarboxylase |
| 49 | 50 | RXA02390W | 85 | I | M | Threonine efflux protein |
| | | | 161 | F | I | Threonine efflux protein |
| 51 | 52 | RXA02399E | 109 | S | F | Isocitrate lyase |
| | | | 155 | T | S | Isocitrate lyase |
| | | | 290 | A | T | Isocitrate lyase |
| 53 | 54 | RXA02399W | 93 | S | F | Isocitrate lyase |
| | | | 139 | T | S | Isocitrate lyase |
| | | | 274 | A | T | Isocitrate lyase |
| | | | 332 | A | T | Isocitrate lyase |
| 55 | 56 | RXA02404K | 80 | M | T | Malate synthase |
| | | | 96 | E | D | Malate synthase |
| | | | 221 | I | V | Malate synthase |
| | | | 232 | E | D | Malate synthase |
| | | | 246 | A | V | Malate synthase |
| | | | 300 | D | N | Malate synthase |
| | | | 326 | I | T | Malate synthase |
| | | | 371 | G | D | Malate synthase |
| 57 | 58 | RXA02591W | 586 | L | F | PEP carboxykinase |
| 59 | 60 | RXA02735E | 73 | G | S | 6-Phosphogluconolactonase |
| 61 | 62 | RXA02735W | 33 | G | S | 6-Phosphogluconolactonase |
| 63 | 64 | RXA02736W | 107 | Y | H | OPCA |
| | | | 219 | K | N | OPCA |
| | | | 233 | P | S | OPCA |
| | | | 261 | Y | H | OPCA |
| 65 | 66 | RXA02737W | 8 | S | T | Glucose 6-phosphate dehydrogenase |
| | | | 321 | G | S | Glucose 6-phosphate dehydrogenase |
| 67 | 68 | RXA02738W | 242 | K | M | Transaldolase |
| 69 | 70 | RXA02739K | 75 | N | D | Transketolase |
| | | | 332 | A | T | Transketolase |
| | | | 556 | V | I | Transketolase |
| 71 | 72 | RXA02910K | 108 | L | I | Transcriptional regulator |
| | | | 152 | E | G | Transcriptional regulator |
| | | | 183 | D | N | Transcriptional regulator |
| 73 | 74 | RXA02910E | 111 | L | I | Transcriptional regulator |
| | | | 155 | E | G | Transcriptional regulator |
| 75 | 76 | RXA03083W | 140 | V | I | Dihadrolipoamide dehydrogenase |
| 77 | 78 | RXA03802K | 149 | V | A | Transcriptional regulator |
| | | | 157 | N | K | Transcriptional regulator |
| | | | 158 | C | S | Transcriptional regulator |
| | | | 190 | S | G | Transcriptional regulator |
| 79 | 80 | RXA04031K | 7 | S | L | Pyruvate carboxylase |
| | | | 639 | S | T | Pyruvate carboxylase |
| | | | 1008 | R | H | Pyruvate carboxylase |
| | | | 1059 | S | P | Pyruvate carboxylase |
| | | | 1120 | D | E | Pyruvate carboxylase |
| 81 | 82 | RXA04073K | 39 | E | K | unknown function |
| 83 | 84 | RXA04174K | 75 | D | N | Aconitase |
| | | | 790 | G | S | Aconitase |
| | | | 892 | T | I | Aconitase |
| 85 | 86 | RXA02175W | 8 | A | T | Citrate synthase |
| | | | 283 | S | N | Citrate synthase |
| | | | 291 | E | A | Citrate synthase |
| | | | 420 | N | K | Citrate synthase |
| 87 | 88 | RXA02175E | 14 | A | T | Citrate synthase |
| 89 | 90 | RXA04186K | 348 | K | E | 5-Methyltetrahydrofolate homocysteine |
| | | | | | | methyltransferase |
| | | | 474 | E | D | 5-Methyltetrahydrofolate homocysteine |
| | | | | | | methyltransferase |
| | | | 731 | E | K | 5-Methyltetrahydrofolate homocysteine |
| | | | | | | methyltransferase |
| | | | 747 | E | K | 5-Methyltetrahydrofolate homocysteine |
| | | | | | | methyltransferase |
| 91 | 92 | RXA00098E | 54 | V | A | Glucose 6-P isomerase |
| | | | 146 | A | P | Glucose 6-P isomerase |
| 93 | 94 | RXA00241K | 5 | S | T | Lysine-specific permease |
| | | | 501 | F | L | Lysine specific permease |
| 95 | 96 | RXA00517E | 110 | H | Y | Malate dehydrogenase |
| | | | 229 | A | S | Malate dehydrogenase |
| | | | 236 | V | I | Malate dehydrogenase |
| | | | 272 | D | E | Malate dehydrogenase |
| | | | 306 | G | T | Malate dehydrogenase |
| | | | 307 | E | Q | Malate dehydrogenase |
| | | | 326 | S | L | Malate dehydrogenase |
| 97 | 98 | RXA00517W | 95 | H | Y | Malate dehydrogenase |
| 97 | 98 | RXA00517W | 214 | A | S | Malate dehydrogenase |
| | | | 221 | V | I | Malate dehydrogenase |
| | | | 257 | D | E | Malate dehydrogenase |
| | | | 291 | G | T | Malate dehydrogenase |
| | | | 292 | E | Q | Malate dehydrogenase |
| | | | 311 | S | L | Malate dehydrogenase |
| 99 | 100 | RXA00519W | 111 | N | T | Isocitrate dehydrogenase |
| | | | 120 | I | T | Isocitrate dehydrogenase |
| | | | 306 | D | N | Isocitrate dehydrogenase |
| | | | 321 | D | E | Isocitrate dehydrogenase |
| 101 | 102 | RXA00533E | 50 | D | G | Aspartate semialdehyde dehydrogenase |
| | | | 218 | R | H | Aspartate semialdehyde dehydrogenase |
| | | | 256 | D | E | Aspartate semialdehyde dehydrogenase |
| | | | 269 | K | E | Aspartate semialdehyde dehydrogenase |
| 103 | 104 | RXA00533K | 234 | R | H | Aspartate semialdehyde dehydrogenase |
| 105 | 106 | RXA00782W | 181 | I | V | Succinate thiokinase |
| 107 | 108 | RXA00822K | 6 | E | D | Regulatory protein |
| 109 | 110 | RXA00975K | 355 | G | D | Arginyl-tRNA synthetase |
| | | | 513 | V | A | Arginyl-tRNA synthetase |
| | | | 540 | H | R | Arginyl-tRNA synthetase |
| 111 | 112 | RXA01311E | 92 | K | N | Succinate dehydrogenase |
| 113 | 114 | RXA01311K | 122 | K | N | Succinate dehydrogenase |
| 115 | 116 | RXA01312E | 328 | E | V | Succinate dehydrogenase |
| | | | 329 | P | K | Succinate dehydrogenase |
| | | | 330 | N | G | Succinate dehydrogenase |
| 115 | 116 | RXA01312E | 332 | N | D | Succinate dehydrogenase |
| | | | 496 | S | A | Succinate dehydrogenase |
| | | | 500 | S | A | Succinate dehydrogenase |
| | | | 507 | Q | V | Succinate dehydrogenase |
| | | | 508 | A | Q | Succinate dehydrogenase |
| | | | 511 | A | E | Succinate dehydrogenase |
| | | | 557 | E | K | Succinate dehydrogenase |
| | | | 564 | N | D | Succinate dehydrogenase |
| | | | 571 | D | E | Succinate dehydrogenase |
| 117 | 118 | RXA01312K | 280 | E | V | Succinate dehydrogenase |
| | | | 281 | P | K | Succinate dehydrogenase |
| | | | 282 | N | G | Succinate dehydrogenase |
| | | | 284 | N | D | Succinate dehydrogenase |
| | | | 448 | S | A | Succinate dehydrogenase |
| | | | 452 | S | A | Succinate dehydrogenase |
| | | | 459 | Q | V | Succinate dehydrogenase |
| | | | 460 | A | Q | Succinate dehydrogenase |
| | | | 463 | A | E | Succinate dehydrogenase |
| | | | 509 | E | K | Succinate dehydrogenase |
| | | | 516 | N | D | Succinate dehydrogenase |
| | | | 523 | D | E | Succinate dehydrogenase |
| 119 | 120 | RXA01350E | 109 | P | S | Malate dehydrogenase |
| | | | 196 | S | F | Malate dehydrogenase |
| | | | 315 | A | G | Malate dehydrogenase |
| 121 | 122 | RXA01350W | 68 | P | S | Malate dehydrogenase |
| 121 | 122 | RXA01350W | 155 | S | F | Malate dehydrogenase |
| | | | 274 | A | G | Malate dehydrogenase |
| | | | 272 | T | I | Malate dehydrogenase |
| 123 | 124 | RXA01393W | 5 | Q | H | Regulator IysG |
| 125 | 126 | RXA02021W | 45 | E | V | 2,3,4,5-Tetrahydropyridine 2-carboxylate N- |
| | | | | | | succinyltransferase |
| | | | 68 | Q | H | 2,3,4,5-Tetrahydropyridine 2-carboxylate N- |
| | | | | | | succinyltransferase |
| | | | 122 | D | N | 2,3,4,5-Tetrahydropyridine 2-carboxylate N- |
| | | | | | | succinyltransferase |
| | | | 275 | G | E | 2,3,4,5-Tetrahydropyridine 2-carboxylate N- |
| | | | | | | succinyltransferase |
| | | | 283 | A | D | 2,3,4,5-Tetrahydropyridine 2-carboxylate N- |
| | | | | | | succinyltransferase |
| 127 | 128 | RXA02022E | 141 | T | I | 2,3,4,5-Tetrahydropyridine 2-carboxylate N- |
| | | | | | | succinyltransferase |
| 129 | 130 | RXA02022K | 114 | T | I | 2,3,4,5-Tetrahydropyridine 2-carboxylate N- |
| | | | | | | succinyltransferase |
| 131 | 132 | RXA02139K | 319 | A | T | Asparagin synthetase |
| | | | 576 | T | A | Asparagin synthetase |
| 133 | 134 | RXA02157W | 36 | N | K | Acetylornithine aminotransferase/N-Succinyl-L,L- |
| | | | | | | DAP aminotransferase |
| | | | 309 | A | T | Acetylornithine aminotransferase/N-Succinyl-L,L- |
| | | | | | | DAP aminotransferase |
| 135 | 136 | RXA02229K | 158 | G | S | Diaminopimelate epimerase |
| 137 | 138 | RXA02259E | 184 | H | Y | PEP carboxylase |
| | | | 263 | G | D | PEP carboxylase |
| | | | 851 | T | R | PEP carboxylase |
| 139 | 140 | RXA02259K | 162 | H | Y | PEP carboxylase |
| 141 | 142 | RXA00970W | 103 | S | A | Homoserine kinase |
| | | | 190 | T | A | Homoserine kinase |

[0174] TABLE 2
Excepted MP proteins

| Column 1 | Column 2 | | Column 4 | Column 5 | Column 6 | |
|---|---|---|---|---|---|---|
| DNA | AA | Column 3 | AA | AA | AA | Column7 |
| ID | ID | Identification | position | wild type | mutant | Function |
| 3 | 4 | RXA00157E | 90 | V | I | Invasin 1 |
| | | | 159 | G | R | Invasin 1 |
| | | | 449 | G | D | Invasin 1 |
| | | | 454 | S | F | Invasin 1 |
| | | | 590 | S | F | Invasin 1 |
| 11 | 12 | RXA00783E | 66 | G | E | Succinyl-CoA synthetase |
| | | | 44 | P | S | Succinyl-CoA synthetase |
| | | | 192 | A | T | Succinyl-CoA synthetase |
| 25 | 26 | RXA01434E | 957 | S | F | Virulence Factor MVIN |
| | | | 1012 | P | S | Virulence Factor MVIN |
| 29 | 30 | RXA02056E | 1059 | P | L | 2-Oxoglutarate dehydrogenase |
| | | | 1121 | A | V | 2-Oxoglutarate dehydrogenase |
| 33 | 34 | RXA02063E | 137 | G | D | Glucose 1-phosphate adenylyl tranferase |
| 43 | 44 | RXA02206E | 73 | G | D | Oxidoreductase |
| | | | 114 | A | T | Oxidoreductase |
| | | | 314 | R | C | Oxidoreductase |
| 51 | 52 | RXA02399E | 348 | A | T | Isocitrate lyase |
| 73 | 74 | RXA02910E | 186 | D | N | Transcriptional regulator |
| 119 | 120 | RXA01350E | 313 | T | I | Malate dehydrogenase |

1. An isolated polypeptide comprising
a) an amino acid sequence which has an amino acid residue that differs from the amino acid residue indicated in Table 1/Column 5 in at least one of the positions corresponding to the positions indicated in Table 1/Column 4 of the same row of the amino acid sequence indicated in Table 1/Column 2 of the same row, wherein the polypeptide has the function indicated in Table 1/Column 7 of the same row; or
b) an amino acid sequence indicated in Table 1/Column 2, wherein the amino acid residue at the position indicated in Table 1/Column 4 of the same row is different from the amino acid residue indicated in Table 1/Column 5 of the same row;
wherein the polypeptide does not consist of the amino acid sequences identified in Table 2.

2. (canceled)

3. The isolated polypeptide of claim 1, wherein the amino acid residue at the position indicated in Table 1/Column 4 is the amino acid residue indicated in Table 1/Column 6 of the same row.

4. An isolated nucleic acid comprising
a) a nucleotide sequence which encodes the polypeptide of claim 1; or
b) a nucleotide sequence comprising a nucleotide sequence indicated in Table 1/Column 1, wherein the nucleotides encoding an amino acid residue at the position corresponding to the position indicated in Table 1/Column 4 of the same row of the amino acid sequence indicated in Table 1/Column 2 of the same row, encode an amino acid residue which is different from the amino acid residue indicated in Table 1/Column 5 of the same row, wherein the nucleotide sequence encodes a polypeptide having the function indicated in Table 1/Column 7 of the same row, and wherein the polypeptide does not consist of the amino acid sequences identified in Table 2.

5. An isolated nucleic acid construct, comprising at least one nucleic acid molecule as claimed in claim 4.

6. The nucleic acid construct as claimed in claim 5, comprising at least one of a promoter and a terminator.

7. A method for preparing a non-human recombinant organism comprising introducing into an organism at least one of a
a) a nucleic acid molecule as claimed in claim 4;
b) a nucleic acid construct comprising the nucleic acid molecule of (a); or
c) a promoter which is heterologous to an endogenous nucleic acid molecule and which enables the expression of said endogenous nucleic acid molecule, wherein said nucleic acid molecule encodes a polypeptide comprising an amino acid sequence which has an amino acid residue that differs from the amino acid residue indicated in Table 1/Column 5 in at least one of the positions corresponding to the positions indicated in Table 1/Column 4 of the same row of the amino acid sequence indicated in Table 1/Column 2 of the same row, wherein the polypeptide has the function indicated in Table 1/Column 7 of the same row, and wherein the polypeptide does not consist of the amino acid sequences identified in Table 2.

8. The method of claim 7, wherein the nucleic acid molecule of a), or the nucleic acid construct of b), is introduced as a replicating plasmid or is integrated chromosomally.

9. The method of claim 7, wherein the promoter of c) is functionally linked to the endogenous nucleic acid molecule.

10. A recombinant organism prepared by the method of claim 7.

11. A nonhuman recombinant organism, transformed with at least one of
a) a nucleic acid molecule as claimed in claim 4;
b) a nucleic acid construct comprising the nucleic acid molecule of (a); or
c) a promoter which is heterologous to an endogenous nucleic acid molecule and which enables the expression of said endogenous nucleic acid molecule, wherein said nucleic acid molecule encodes a polypeptide comprising an amino acid sequence which has an amino acid residue that differs from the amino acid residue indicated in Table 1/Column 5 in at least one of the positions corresponding to the positions indicated in Table 1/Column 4 of the same row of the amino acid sequence indicated in Table 1/Column 2 of the same row, wherein the polypeptide has the function indicated in Table 1/Column 7 of the same row, and wherein the polypeptide does not consist of the amino acid sequences identified in Table 2.

12. The recombinant organism of claim 11, wherein the organism is capable of producing a fine chemical.

13. The recombinant organism of claim 11, wherein expression of said nucleic acid molecule results in the modulation of production of a fine chemical from said organism.

14. A method for the preparation of a fine chemical, comprising culturing the recombinant organism of claim 11 under conditions suitable for the preparation of a fine chemical.

15. A method for the preparation of a fine chemical, comprising culturing a non-human organism, wherein the organism is transformed with at least one of
a) a nucleic acid molecule as claimed in claim 4;
b) a nucleic acid construct comprising the nucleic acid molecule of (a); or
c) a promoter which is heterologous to an endogenous nucleic acid molecule and which enables the expression of said endogenous nucleic acid molecule, wherein said nucleic acid molecule encodes a polypeptide comprising an amino acid sequence which has an amino acid residue that differs from the amino acid residue indicated in Table 1/Column 5 in at least one of the positions corresponding to the positions indicated in Table 1/Column 4 of the same row of the amino acid sequence indicated in Table 1/Column 2 of the same row, wherein the polypeptide has the function indicated in Table 1/Column 7 of the same row, and wherein the polypeptide does not consist of the amino acid sequences identified in Table 2.

16. The method of claim 15, wherein the fine chemical is isolated from the organism and/or the culturing medium.

17. The method of claim 15, wherein the organism is a microorganism.

18. The method of claim 17, wherein the microorganism belongs to the bacterial genus Corynebacterium or Brevibacterium.

19. The method of claim 15, wherein the fine chemical is an amino acid.

20. The method of claim 19, wherein the amino acid is selected from the group consisting of L-lysine, L-threonine and L-methionine.

The application's sequence listing, which the Patent Office published only in electronic form, follows.

SEQUENCE LISTING (142 sequences)

SEQ ID NO: 1 - DNA, 1848 bp, Corynebacterium glutamicum
  CDS (1)..(1848): RXA00149K
ttgactgatctcacaaagactgcggtgcccgaggaactttcagagaacctcgaaacttggtacaaggctgtggccggtgttttcgcgcgcacacagaaaaaagacatcggcgacattgccgtagatgtgtggaagaaactcatcgtcactacaccggatggtgttgatatcaatccgctgtacaccagagcagatgagtcccagaggaaattcactgaggttcctggtgagtttcccttcactaggggaaccactgttgatggtgaacgcgttggttggggtgttactgagactttcggacatgacagcccgaagaatatcaacgctgcggtgctgaatgctctgaattctggcaccaccacattgggttttgagttctctgaggaattcacggcagctgatcttaaagttgctctcgaaggcgtgtatctcaacatggctccgttgctgattcatgcgggtggatccacgtcagaggttgcagcggcgttgtatacgttggcggaggaagccggaacgttttttgctgcgttgaccttgggttctcgtcctttgacggcgcaggttgatggttcgcacagtgacaccattgaagaagcagttcagttggcagtgaatgcttccaagcgtgcgaatgtgcgcgctatcttggtggatggttccagtttttccaaccagggcgcgtcggatgctcaagaaattggtctaagtatcgccgccggtgtggattatgtccgtcgcttggtcgatgcaggcctttccacggaagctgcacttaagcaggtggcgttccgttttgcggtcaccgatgagcagttcgcgcagatttctaagctgcgtgtggctcgacgtctgtgggccagggtgtgtgaggtgcttggttttccagagctggccgtagcaccacagcatgcggtgactgcacgagcgatgtttagccagcgtgatccgtgggtgaatatgctgcgcagtactgttgcagctttcgctgcaggcgtcggtggagcaaccgatgtggaggttcgtacttttgatgatgcgatcccagatggagttcctggagtgtcgaggaatttcgctcaccgcatcgcgcgcaatactaatttgttgttgctagaagagtcacatcttggtcacgtggttgatcctgctggtggatcatatttcgtggagagcttcaccgatgatctagcggagaaggcgtgggctgtgttcagtggcatcgaagctgagggcggatacagtgcagcttgtgcatccggcacggtgactgccatgcttgatcagacgtgggagcagactcgcgctgatgtggcgtcgagaaagaagaagctcactggaattaatgagttcccgaacttggcggagtctccgctgccagctgatcgtcgggtagaacctgcaggtgtgcgtcgatgggcagcggattttgaagcgctgcgcaatcgttcggatgctttcttggaaaagaacggcgcgaggccacagatcacgatgattcctctgggaccgttgtccaagcacaatattcgcactggttttacttccaacctgttggcttccggtggcattgaagcaatcaacccgggtcaacttgttcccggcactgacgcttttgcagaagctgcacaggccgcaggcattgtagtggtgtgtggaacggaccaagagtatgccgaaacgggggagggagccgtcgaaaagctccgcgaagcgggcgttgagcgcatcctgcttgctggcgcgccgaagagctttgagggcagcgcgcatgcgcccgatggttatttgaacatgacaattgatgccgcggcgacgctggctgacctgctagatgctttgggagct

SEQ ID NO: 2 - protein, 616 aa, Corynebacterium glutamicum
MTDLTKTAVPEELSENLETWYKAVAGVFARTQKKDIGDIAVDVWKKLIVTTPDGVDINPLYTRADESQRKFTEVPGEFPFTRGTTVDGERVGWGVTETFGHDSPKNINAAVLNALNSGTTTLGFEFSEEFTAADLKVALEGVYLNMAPLLIHAGGSTSEVAAALYTLAEEAGTFFAALTLGSRPLTAQVDGSHSDTIEEAVQLAVNASKRANVRAILVDGSSFSNQGASDAQEIGLSIAAGVDYVRRLVDAGLSTEAALKQVAFRFAVTDEQFAQISKLRVARRLWARVCEVLGFPELAVAPQHAVTARAMFSQRDPWVNMLRSTVAAFAAGVGGATDVEVRTFDDAIPDGVPGVSRNFAHRIARNTNLLLLEESHLGHVVDPAGGSYFVESFTDDLAEKAWAVFSGIEAEGGYSAACASGTVTAMLDQTWEQTRADVASRKKKLTGINEFPNLAESPLPADRRVEPAGVRRWAADFEALRNRSDAFLEKNGARPQITMIPLGPLSKHNIRTGFTSNLLASGGIEAINPGQLVPGTDAFAEAAQAAGIVVVCGTDQEYAETGEGAVEKLREAGVERILLAGAPKSFEGSAHAPDGYLNMTIDAAATLADLLDALGA

SEQ ID NO: 3 - DNA, 1890 bp, Corynebacterium glutamicum
  CDS (1)..(1890): RXA00157E
gtggccaatctagattcagttcgccctggggtgcgggcagctcttcgacgtacccatacccaggtaaaaggtgtcacgttgaccagggcgttgattgcgcttgcagtaagcggagctttgcttagttccatgactccggcggtggcgcagccacagaatccggatgacgcagccattgcacaggcagaggaaaatgtttcggcgggcgatggggaagtcgcccgcctggcaggatctttgtccagcactgacgcggaaattaaccgcgtcgagctggaaatgggtgctctgcgtgaagaagtgaacaagtccctcgtggatttgcatgatgcgcaggcaatcgccgagcaggcccgccaagatgcacttgcagccaagaaggatctcgatgattctcaagcgcagatcgaagcagcccaagagcgccttgatgagatttcacgtgcagcgtatcgccaaaacggaacctccaaggggctttcaggcatctcgggcaatggaaattctgaagatgcgctagatcgtcagacttacctgcgaaccagtgcggaaaagcagcaggcagctgttgaagagcttgatcgcctccgtacggaaaacgccaacaaggaatcggtgttgcgccaggcccgcatcgttgctgagcagcgtgaggcggaagccgtcgaaaagcaagtccagaccgaggctgcaattgccgcaaacagcgagcagctcaatgtcttgactaacaatcgcagtaccttggttgcccagcgtgatggggctgagcgcaacttggccatcgctcgtgcgcaggcggataatctgcaaggtcagcgtgctgagtacgaggaattccagcaggcagagcaggctcgcatccaggcggaagcggaagctcaggctgctgcggaggagaagcgtcgtgccgatgaggctgctgcacaggcagccgctgaagctcaagaagctgcccagcaagctcaggcggcggaggaagcccaagccgcgcaagcagctgagacagcacaagcccaagccgcgcaagctgcggaaacccaagctgcacaagccgcgcaagctcaggcagaagcgaatgatcgtgccgccgcgcaacagcgtgctgcagaggctcaagcagcagcggaacaggcgcaacgtgaggctgacgctcaggcggccaacgatgcccaagctcaggcactgcgtgaacaggcgctcaccgcagcctccatcgctgcggctgctctaattgcggcgagccagtccagccatgccactactcaaaatccttacccaactgatgaagacgcggatccgaccgatattgcggacatccaaggcccaacgcagccaggtacgggtgagtctggagattcccagagcaactccagcgacaacgattccacaggcaacgattccacaggctctgactcttcagattcagattcctccggcaacgattcttcagaggttatttccggcgatcgttccgctcagattgagactgtgattgcgcgcgccatgagccagttgggtgtgcagtacgcatggggtggcggtaacgctaatggcccaactctgggtatccgtgacggtggcgtggcggactcttacggcgattacaacaaggttggcttcgactgctctggactgaccttgtatgcgtttgcgggtgtgggaatttcacttcctcactacacgggctaccagtaccagcacggcaccaaggtgtcgccttctgagatgcaacgtggcgatctgatcttctatggtccgggagcgtctcagcacgtggcaatttacctcggtgatggtcagatgattgaggctccgaattcgggttctgtcgtgaagatttctcctgttcgctggagcggaatgaccgagagcgtggtacgcctcatt

SEQ ID NO: 4 - protein, 630 aa, Corynebacterium glutamicum
MANLDSVRPGVRAALRRTHTQVKGVTLTRALIALAVSGALLSSMTPAVAQPQNPDDAAIAQAEENVSAGDGEVARLAGSLSSTDAEINRVELEMGALREEVNKSLVDLHDAQAIAEQARQDALAAKKDLDDSQAQIEAAQERLDEISRAAYRQNGTSKGLSGISGNGNSEDALDRQTYLRTSAEKQQAAVEELDRLRTENANKESVLRQARIVAEQREAEAVEKQVQTEAAIAANSEQLNVLTNNRSTLVAQRDGAERNLAIARAQADNLQGQRAEYEEFQQAEQARIQAEAEAQAAAEEKRRADEAAAQAAAEAQEAAQQAQAAEEAQAAQAAETAQAQAAQAAETQAAQAAQAQAEANDRAAAQQRAAEAQAAAEQAQREADAQAANDAQAQALREQALTAASIAAAALIAASQSSHATTQNPYPTDEDADPTDIADIQGPTQPGTGESGDSQSNSSDNDSTGNDSTGSDSSDSDSSGNDSSEVISGDRSAQIETVIARAMSQLGVQYAWGGGNANGPTLGIRDGGVADSYGDYNKVGFDCSGLTLYAFAGVGISLPHYTGYQYQHGTKVSPSEMQRGDLIFYGPGASQHVAIYLGDGQMIEAPNSGSVVKISPVRWSGMTESVVRLI

SEQ ID NO: 5 - DNA, 1800 bp, Corynebacterium glutamicum
  CDS (1)..(1800): RXA00157K
ttgattgcgcttgcagtaagcggagctttgcttagttccatgactccggcggtggcgcagccacagaatccggatgacgcagccattgcacaggcagaggaaaatgtttcggcgggcgatggggaagtcgcccgcctggcaggatctttgtccagcactgacgcggaaattaaccgcgtcgagctggaaatgggtgctctgcgtgaagaagtgaacaagtccctcgtggatttgcatgatgcgcaggcaatcgccgagcaggcccgccaagatgcacttgcagccaagaaggatctcgatgattctcaagcgcagatcgaagcagcccaagagcgccttgatgagatttcacgtgcagcgtatcgccaaaacggaacctccaaggggctttcaggcatctcgggcaatggaaattctgaagatgcgctagatcgtcagacttacctgcgaaccagtgcggaaaagcagcaggcagctgttgaagagcttgatcgcctccgtacggaaaacgccaacaaggaatcggtgttgcgccaggcccgcatcgttgctgagcagcgtgaggcggaagccgtcgaaaagcaagtccagaccgaggctgcaattgccgcaaacagcgagcagctcaatgtcttgactaacaatcgcagtaccttggttgcccagcgtgatggggctgagcgcaacttggccatcgctcgtgcgcaggcggataatctgcaaggtcagcgtgctgagtacgaggaattccagcaggcagagcaggctcgcatccaggcggaagcggaagctcaggctgctgcggaggagaagcgtcgtgccgatgaggctgctgcacaggcagccgctgaagctcaagaagctgcccagcaagctcaggcggcggaggaagcccaagccgcgcaagcagctgagacagcacaagcccaagccgcgcaagctgcggaaacccaagctgcacaagccgcgcaagctcaggcagaagcgaatgatcgtgccgccgcgcaacagcgtgctgcagaggctcaagcagcagcggaacaggcgcaacgtgaggctgacgctcaggcggccaacgatgcccaagctcaggcactgcgtgaacaggcgctcaccgcagcctccatcgctgcggctgctctaattgcggcgagccagtccagccatgccactactcaaaatccttacccaactgatgaagacgcggatccgaccgatattgcggacatccaaggcccaacgcagccaggtacgggtgagtctggagattcccagagcaactccagcgacaacgattccacaggcaacgattccacaggctctgactcttcagattcagattcctccggcaacgattcttcagaggttatttccggcgatcgttccgctcagattgagactgtgattgcgcgcgccatgagccagttgggtgtgcagtacgcatggggtggcggtaacgctaatggcccaactctgggtatccgtgacggtggcgtggcggactcttacggcgattacaacaaggttggcttcgactgctctggactgaccttgtatgcgtttgcgggtgtgggaatttcacttcctcactacacgggctaccagtaccagcacggcaccaaggtgtcgccttctgagatgcaacgtggcgatctgatcttctatggtccgggagcgtctcagcacgtggcaatttacctcggtgatggtcagatgattgaggctccgaattcgggttctgtcgtgaagatttctcctgttcgctggagcggaatgaccgagagcgtggtacgcctcatt

SEQ ID NO: 6 - protein, 600 aa, Corynebacterium glutamicum
MIALAVSGALLSSMTPAVAQPQNPDDAAIAQAEENVSAGDGEVARLAGSLSSTDAEINRVELEMGALREEVNKSLVDLHDAQAIAEQARQDALAAKKDLDDSQAQIEAAQERLDEISRAAYRQNGTSKGLSGISGNGNSEDALDRQTYLRTSAEKQQAAVEELDRLRTENANKESVLRQARIVAEQREAEAVEKQVQTEAAIAANSEQLNVLTNNRSTLVAQRDGAERNLAIARAQADNLQGQRAEYEEFQQAEQARIQAEAEAQAAAEEKRRADEAAAQAAAEAQEAAQQAQAAEEAQAAQAAETAQAQAAQAAETQAAQAAQAQAEANDRAAAQQRAAEAQAAAEQAQREADAQAANDAQAQALREQALTAASIAAAALIAASQSSHATTQNPYPTDEDADPTDIADIQGPTQPGTGESGDSQSNSSDNDSTGNDSTGSDSSDSDSSGNDSSEVISGDRSAQIETVIARAMSQLGVQYAWGGGNANGPTLGIRDGGVADSYGDYNKVGFDCSGLTLYAFAGVGISLPHYTGYQYQHGTKVSPSEMQRGDLIFYGPGASQHVAIYLGDGQMIEAPNSGSVVKISPVRWSGMTESVVRLI

SEQ ID NO: 7 - DNA, 1485 bp, Corynebacterium glutamicum
  CDS (1)..(1485): RXA00330W
gtgggggagtattgtgtcaccccttgggatagggttatatccgtggactacatttcgacgcgtgatgccagccgtacccctgcccgcttcagtgatattttgctgggcggtctagcaccagacggcggcctgtacctgcctgcaacctaccctcaactagatgatgcccagctgagtaaatggcgtgaggtattagccaacgaaggatacgcagctttggctgctgaagttatctccctgtttgttgatgacatcccagtagaagacatcaaggcgatcaccgcacgcgcctacacctacccgaagttcaacagcgaagacatcgttcctgtcaccgaactcgaggacaacatttacctgggccacctttccgaaggcccaaccgctgcattcaaagacatggccatgcagctgctcggcgaacttttcgaatacgagcttcgccgccgcaacgaaaccatcaacatcctgggcgctacctctggcgataccggctcctctgcggaatacgccatgcgcggccgcgagggaatccgcgtattcatgctgaccccagctggccgcatgaccccattccagcaagcacagatgtttggccttgacgatccaaacatcttcaacatcgccctcgacggcgttttcgacgattgccaagacgtagtcaaggctgtctccgccgacgcagaattcaaaaaagacaaccgcatcggtgccgtgaactccatcaactgggcacgccttatggcacaggttgtgtactacgtttcctcatggatccgcaccacaaccagcaatgaccaaaaggtcagcttctccgtaccaaccggcaacttcggtgacatttgcgcaggccacatcgcccgccaaatgggacttcccatcgatcgcctcatcgtggccaccaacgaaaacgatgtgctcgacgagttcttccgtaccggcgactaccgagtccgcagctccgcagacacccacgagacctcctcaccttcgatggatatctcccgcgcctccaacttcgagcgtttcatcttcgacctgctcggccgcgacgccacccgcgtcaacgatctatttggtacccaggttcgccaaggcggattctcactggctgatgacgccaactttgagaaggctgcagcagaatacggtttcgcctccggacgatccacccatgctgaccgtgtggcaaccatcgctgacgtgcattcccgcctcgacgtactaatcgatccccacaccgccgacggcgttcacgtggcacgccagtggagggacgaggtcaacaccccaatcatcgtcctagaaactgcactcccagtgaaatttgccgacaccatcgtcgaagcaattggtgaagcacctcaaactccagagcgtttcgccgcgatcatggatgctccattcaaggtttccgacctaccaaacgacaccgatgcagttaagcagtacatagtcgatgcgattgcaaacacttccgtgaag

SEQ ID NO: 8 - protein, 495 aa, Corynebacterium glutamicum
MGEYCVTPWDRVISVDYISTRDASRTPARFSDILLGGLAPDGGLYLPATYPQLDDAQLSKWREVLANEGYAALAAEVISLFVDDIPVEDIKAITARAYTYPKFNSEDIVPVTELEDNIYLGHLSEGPTAAFKDMAMQLLGELFEYELRRRNETINILGATSGDTGSSAEYAMRGREGIRVFMLTPAGRMTPFQQAQMFGLDDPNIFNIALDGVFDDCQDVVKAVSADAEFKKDNRIGAVNSINWARLMAQVVYYVSSWIRTTTSNDQKVSFSVPTGNFGDICAGHIARQMGLPIDRLIVATNENDVLDEFFRTGDYRVRSSADTHETSSPSMDISRASNFERFIFDLLGRDATRVNDLFGTQVRQGGFSLADDANFEKAAAEYGFASGRSTHADRVATIADVHSRLDVLIDPHTADGVHVARQWRDEVNTPIIVLETALPVKFADTIVEAIGEAPQTPERFAAIMDAPFKVSDLPNDTDAVKQYIVDAIANTSVK

SEQ ID NO: 9 - DNA, 1092 bp, Corynebacterium glutamicum
  CDS (1)..(1092): RXA00683W
atgaccaacagtttgaacatcccgtttgtccagcgcttcgatgaaggcctggatcctgttctagaagtactcggtggcaagggcgcttcactagtcaccatgacagatgctggaatgcccgttccacctggatttgtggtcactactgccagctttgatgaattcatccgtgaagcaggggttgctgaacacatcgataaattcctaaacgatctcgatgcagaagatgttaaggaagtggatcgagtttctgcgatcatccgcgatgagctgtgcagtcttgacgttccagagaatgctcgtttcgcagtgcaccaggcttatcgcgatctcatggaacgatgcggtggcgacgtcccggttgctgtccggtcatcggccactgccgaagatctgcccgatgcttccttcgcagggcaacaggacacctatctgtggcaagtcggtttgagcgctgtcactgaacacatccgtaaatgctgggcttcgctgttcacttcccgtgccattatctaccgtctgaaaaacaacatccccaatgagggcctctccatggcggtagttgttcaaaaaatggtcaactctcgtgtcgcaggcgtggcaatcactatgaatccttccaacggcgaccgctcgaagatcaccatcgattcctcatggggtgttggtgaaatggtggtctcaggtgaagtgacaccagacaatatcttgctggacaagatcacgctgcaggttgtctccgaacacattggaagcaaacacgctgaactcatccccgatgccaccagtggaagcctcgtggaaaagcccgttgatgaagaacgcgcaaaccgccgcagtctgactgatgaggaaatgctcgctgtggcacaaatggctaagcgtgcagaaaaacactacaagtgcccacaagatatcgaatgggcgctggacgctgatctgccagatggagaaaaccttctgttattgcaatcccgcccggaaactatccactccaacggtgtgaagaaggaaaccccaactccgcaggctgccaaaaccataggcaccttcgatttcagctcaatcaccgtcgcaatgaccggcacgaag

SEQ ID NO: 10 - protein, 364 aa, Corynebacterium glutamicum
MTNSLNIPFVQRFDEGLDPVLEVLGGKGASLVTMTDAGMPVPPGFVVTTASFDEFIREAGVAEHIDKFLNDLDAEDVKEVDRVSAIIRDELCSLDVPENARFAVHQAYRDLMERCGGDVPVAVRSSATAEDLPDASFAGQQDTYLWQVGLSAVTEHIRKCWASLFTSRAIIYRLKNNIPNEGLSMAVVVQKMVNSRVAGVAITMNPSNGDRSKITIDSSWGVGEMVVSGEVTPDNILLDKITLQVVSEHIGSKHAELIPDATSGSLVEKPVDEERANRRSLTDEEMLAVAQMAKRAEKHYKCPQDIEWALDADLPDGENLLLLQSRPETIHSNGVKKETPTPQAAKTIGTFDFSSITVAMTGTK

SEQ ID NO: 11 - DNA, 1272 bp, Corynebacterium glutamicum
  CDS (1)..(1272): RXA00783E
ttgaaacacttacttttacgggaagactttgttaaagacgcagaaggctctaagcatgggccggaaatggaattggcagtggatctttttgaataccaagcacgggacctctttgaaacccatggtgtgccagtgttgaagggaattgtggcatcaacaccagaggcggcgaggaaagcggctgaggaaatcggcggactgaccgtcgtcaaggctcaggtcaaggtgggcggacgtggcaaggcgggtggcgtccgtgtggcaccgacgtcggctcaggcttttgatgctgcggatgcgattctcggcatggatatcaaaggacacactgttaatcaggtgatggtggcgcagggcgctgacattgctgaggaatactatttctccattttgttggatcgcgcgaatcgttcgtatctggctatgtgctctgttgaaggtggcatggagatcgagatcctggcgaaggaaaagcctgaagctttggcaaaggtggaagtggatcccctcactggtattgatgaggacaaagcgcgggagattgtcactgctgctggctttgaaactgaggtggcagagaaagtcattccggtgctgatcaagatctggcaggtgtattacgaagaggaagcaacactcgttgaggtgaacccgttggtgctcacggatgacggcgatgtgattgcgcttgatggcaagatcacgctggatgataacgctgatttccgccatgataaccgtggtgcgttggctgaatctgccggtggcttggacattttggaactgaaggccaagaagaatgatctgaactacgtgaaacttgatggctctgtgggcatcattggcaatggtgcaggtttggtgatgtccacgttggatatcgtggctgcagctggtgaacgccatggtgggcagcgccccgcgaacttcctagacattggtggcggagcatcagctgaatcgatggctgctggtctcgatgtgatccttggggatagccaggtacgcagtgtgtttgtgaatgtgtttggtggcatcaccgcgtgtgatgtggtggcaaagggaatcgttggagctttggatgtgctcggcgatcaagcaacgaagcctcttgtggtgcgccttgatggcaacaacgtggtggaaggcagacgaatcctcgcggaatataaccaccctttggtcaccgttgtggagggtatggatgcagcggctgatcacgctgcccatttggccaatcttgcccagcacggccagttcgcaaccgctaat

SEQ ID NO: 12 - protein, 424 aa, Corynebacterium glutamicum
MKHLLLREDFVKDAEGSKHGPEMELAVDLFEYQARDLFETHGVPVLKGIVASTPEAARKAAEEIGGLTVVKAQVKVGGRGKAGGVRVAPTSAQAFDAADAILGMDIKGHTVNQVMVAQGADIAEEYYFSILLDRANRSYLAMCSVEGGMEIEILAKEKPEALAKVEVDPLTGIDEDKAREIVTAAGFETEVAEKVIPVLIKIWQVYYEEEATLVEVNPLVLTDDGDVIALDGKITLDDNADFRHDNRGALAESAGGLDILELKAKKNDLNYVKLDGSVGIIGNGAGLVMSTLDIVAAAGERHGGQRPANFLDIGGGASAESMAAGLDVILGDSQVRSVFVNVFGGITACDVVAKGIVGALDVLGDQATKPLVVRLDGNNVVEGRRILAEYNHPLVTVVEGMDAAADHAAHLANLAQHGQFATAN

SEQ ID NO: 13 - DNA, 1194 bp, Corynebacterium glutamicum
  CDS (1)..(1194): RXA00783K
gtggatctttttgaataccaagcacgggacctctttgaaacccatggtgtgccagtgttgaagggaattgtggcatcaacaccagaggcggcgaggaaagcggctgaggaaatcggcggactgaccgtcgtcaaggctcaggtcaaggtgggcggacgtggcaaggcgggtggcgtccgtgtggcaccgacgtcggctcaggcttttgatgctgcggatgcgattctcggcatggatatcaaaggacacactgttaatcaggtgatggtggcgcagggcgctgacattgctgaggaatactatttctccattttgttggatcgcgcgaatcgttcgtatctggctatgtgctctgttgaaggtggcatggagatcgagatcctggcgaaggaaaagcctgaagctttggcaaaggtggaagtggatcccctcactggtattgatgaggacaaagcgcgggagattgtcactgctgctggctttgaaactgaggtggcagagaaagtcattccggtgctgatcaagatctggcaggtgtattacgaagaggaagcaacactcgttgaggtgaacccgttggtgctcacggatgacggcgatgtgattgcgcttgatggcaagatcacgctggatgataacgctgatttccgccatgataaccgtggtgcgttggctgaatctgccggtggcttggacattttggaactgaaggccaagaagaatgatctgaactacgtgaaacttgatggctctgtgggcatcattggcaatggtgcaggtttggtgatgtccacgttggatatcgtggctgcagctggtgaacgccatggtgggcagcgccccgcgaacttcctagacattggtggcggagcatcagctgaatcgatggctgctggtctcgatgtgatccttggggatagccaggtacgcagtgtgtttgtgaatgtgtttggtggcatcaccgcgtgtgatgtggtggcaaagggaatcgttggagctttggatgtgctcggcgatcaagcaacgaagcctcttgtggtgcgccttgatggcaacaacgtggtggaaggcagacgaatcctcgcggaatataaccaccctttggtcaccgttgtggagggtatggatgcagcggctgatcacgctgcccatttggccaatcttgcccagcacggccagttcgcaaccgctaat

SEQ ID NO: 14 - protein, 398 aa, Corynebacterium glutamicum
MDLFEYQARDLFETHGVPVLKGIVASTPEAARKAAEEIGGLTVVKAQVKVGGRGKAGGVRVAPTSAQAFDAADAILGMDIKGHTVNQVMVAQGADIAEEYYFSILLDRANRSYLAMCSVEGGMEIEILAKEKPEALAKVEVDPLTGIDEDKAREIVTAAGFETEVAEKVIPVLIKIWQVYYEEEATLVEVNPLVLTDDGDVIALDGKITLDDNADFRHDNRGALAESAGGLDILELKAKKNDLNYVKLDGSVGIIGNGAGLVMSTLDIVAAAGERHGGQRPANFLDIGGGASAESMAAGLDVILGDSQVRSVFVNVFGGITACDVVAKGIVGALDVLGDQATKPLVVRLDGNNVVEGRRILAEYNHPLVTVVEGMDAAADHAAHLANLAQHGQFATAN

SEQ ID NO: 15 - DNA, 1335 bp, Corynebacterium glutamicum
  CDS (1)..(1335): RXA00969K
atgacctcagcatctgccccaagctttaaccccggcaagggtcccggctcagcagtcggaattgcccttttaggattcggaacagtcggcactgaggtgatgcgtctgatgaccgagtacggtgatgaacttgcgcaccgcattggtggcccactggaggttcgtggcattgctgtttctgatatctcaaagccacgtgaaggcgttgcacctgagctgctcactgaggacgcttttgcactcatcgagcgcgaggatgttgacatcgtcgttgaggttatcggcggcattgagtacccacgtgaggtagttctcgcagctctgaaggccggcaagtctgttgttaccgccaataaggctcttgttgcagctcactctgctgagcttgctgatgcagcggaagccgcaaacgttgacctgtacttcgaggctgctgttgcaggcgcaattccagtggttggcccactgcgtcgctccctggctggcgatcagatccagtctgtgatgggcatcgttaacggcaccaccaacttcatcttggacgccatggattccaccggcgctgactatgcagattctttggctgaggcaactcgtttgggttacgccgaagctgatccaactgcagacgtcgaaggccatgacgccgcatccaaggctgcaattttggcatccatcgctttccacacccgtgttaccgcggatgatgtgtactgcgaaggtatcagcaacatcagcgctgccgacattgaggcagcacagcaggcaggccacaccatcaagttgttggccatctgtgagaagttcaccaacaaggaaggaaagtcggctatttctgctcgcgtgcacccgactctattacctgtgtcccacccactggcgtcggtaaacaagtcctttaatgcaatctttgttgaagcagaagcagctggtcgcctgatgttctacggaaacggtgcaggtggcgcgccaaccgcgtctgctgtgcttggcgacgtcgttggtgccgcacgaaacaaggtgcacggtggccgtgctccaggtgagtccacctacgctaacctgccgatcgctgatttcggtgagaccaccactcgttaccacctcgacatggatgtggaagatcgcgtgggggttttggctgaattggctagcctgttctctgagcaaggaatctccctgcgtacaatccgacaggaagagcgcgatgatgatgcacgtctgatcgtggtcacccactctgcgctggaatctgatctttcccgcaccgttgaactgctgaaggctaagcctgttgttaaggcaatcaacagtgtgatccgcctcgaaagggac

SEQ ID NO: 16 - protein, 445 aa, Corynebacterium glutamicum
MTSASAPSFNPGKGPGSAVGIALLGFGTVGTEVMRLMTEYGDELAHRIGGPLEVRGIAVSDISKPREGVAPELLTEDAFALIEREDVDIVVEVIGGIEYPREVVLAALKAGKSVVTANKALVAAHSAELADAAEAANVDLYFEAAVAGAIPVVGPLRRSLAGDQIQSVMGIVNGTTNFILDAMDSTGADYADSLAEATRLGYAEADPTADVEGHDAASKAAILASIAFHTRVTADDVYCEGISNISAADIEAAQQAGHTIKLLAICEKFTNKEGKSAISARVHPTLLPVSHPLASVNKSFNAIFVEAEAAGRLMFYGNGAGGAPTASAVLGDVVGAARNKVHGGRAPGESTYANLPIADFGETTTRYHLDMDVEDRVGVLAELASLFSEQGISLRTIRQEERDDDARLIVVTHSALESDLSRTVELLKAKPVVKAINSVIRLERD

SEQ ID NO: 17 - DNA, 690 bp, Corynebacterium glutamicum
  CDS (1)..(690): RCGL01443K
gtgaccacacaaaccgcccctaccgcagcctccgatctttttgccgagtcctacaaactcagcccaaagcagcgcgaagttttagatgccctacaaaccttccctgacggtgcccgcgcgatcgatgtcgccaaaaaactcgaccttcacgtcaacaccgcccgcggccacctcgaagaactcgtagcaaaagaagccatccgagtagtcaccgcagcagccaaaggtcgcggacgcccctccctcatcttccaaacacgcgtccccgacaaccgcgctgtcgccaaagaatacatcaccctgatcgaactcatggccaacatgctcggcgatgtcgacgatgacgcaatgcacaaccccgacctccgcgccaaagcactttccatcggaacccagtgggcacacgtcatgggcattaaccacgccgaagccgaagaactcgacgaagccctctccccgctcattaaccgcctccgcgaaatgggctttgaccccaccgaaaccgaagaagcaaactccctcgctctacacagctgcccatttgtggtcaacgacaaacgcccatcagccttcgtctgcgccatccacgccggattcatccaagaaagcctcggtgaaaacaaccgcatccagctggaactcaaaccactcaacgcgccgggcacctgtaaggttcacgtgttcagcgaa

SEQ ID NO: 18 - protein, 230 aa, Corynebacterium glutamicum
MTTQTAPTAASDLFAESYKLSPKQREVLDALQTFPDGARAIDVAKKLDLHVNTARGHLEELVAKEAIRVVTAAAKGRGRPSLIFQTRVPDNRAVAKEYITLIELMANMLGDVDDDAMHNPDLRAKALSIGTQWAHVMGINHAEAEELDEALSPLINRLREMGFDPTETEEANSLALHSCPFVVNDKRPSAFVCAIHAGFIQESLGENNRIQLELKPLNAPGTCKVHVFSE

SEQ ID NO: 19 - DNA, 1476 bp, Corynebacterium glutamicum
  CDS (1)..(1476): RXA00999K
atgccgtcaagtacgatcaataacatgactaatggagataatctcgcacagatcggcgttgtaggcctagcagtaatgggctcaaacctcgcccgcaacttcgcccgcaacggcaacactgtcgctgtctacaaccgcagcactgacaaaaccgacaagctcatcgccgatcacggctccgaaggcaacttcatcccttctgcaaccgtcgaagagttcgtagcatccctggaaaagccacgccgcgccatcatcatggttcaggctggtaacgccaccgacgcagtcatcaaccagctggcagatgccatggacgaaggcgacatcatcatcgacggcggcaacgccctctacaccgacaccattcgtcgcgagaaggaaatctccgcacgcggtctccacttcgtcggtgctggtatctccggcggcgaagaaggcgcactcaacggcccatccatcatgcctggtggcccagcaaagtcctacgagtccctcggaccactgcttgagtccatcgctgccaacgttgacggcaccccatgtgtcacccacatcggcccagacggcgccggccacttcgtcaagatggtccacaacggcatcgagtacgccgacatgcaggtcatcggcgaggcataccaccttctccgctacgcagcaggcatgcagccagctgaaatcgctgaggttttcaaggaatggaacgcaggcgacctggattcctacctcatcgaaatcaccgcagaggttctctcccaggtggatgctgaaaccggcaagccactaatcgacgtcatcgttgacgctgcaggtcagaagggcaccggacgttggaccgtcaaggctgctcttgatctgggtattgctaccaccggcatcggcgaagctgttttcgcacgtgcactctccggcgcaaccagccagcgcgctgcagcacagggcaacctacctgcaggtgtcctcaccgatctggaagcacttggcgtggacaaggcacagttcgtcgaagacgttcgccgtgcactgtacgcatccaagcttgttgcttacgcacagggcttcgacgagatcaaggctggctccgacgagaacaactgggacgttgaccctcgcgacctcgctaccatctggcgcggcggctgcatcattcgcgctaagttcctcaaccgcatcgtcgaagcatacgatgcaaacgctgaacttgagtccctgctgctcgatccttacttcaagagcgagctcggcgacctcatcgattcatggcgtcgcgtgattgtcaccgccacccagcttggcctgccaatcccagtgttcgcttcctccctgtcctactacgacagcctgcgtgcagagcgtctgccagcagccctgatccaaggacagcgcgacttcttcggtgcgcacacctacaagcgcatcgacaaggatggctccttccacaccgagtggtccggcgaccgctccgaggttgaagct

SEQ ID NO: 20 - protein, 492 aa, Corynebacterium glutamicum
MPSSTINNMTNGDNLAQIGVVGLAVMGSNLARNFARNGNTVAVYNRSTDKTDKLIADHGSEGNFIPSATVEEFVASLEKPRRAIIMVQAGNATDAVINQLADAMDEGDIIIDGGNALYTDTIRREKEISARGLHFVGAGISGGEEGALNGPSIMPGGPAKSYESLGPLLESIAANVDGTPCVTHIGPDGAGHFVKMVHNGIEYADMQVIGEAYHLLRYAAGMQPAEIAEVFKEWNAGDLDSYLIEITAEVLSQVDAETGKPLIDVIVDAAGQKGTGRWTVKAALDLGIATTGIGEAVFARALSGATSQRAAAQGNLPAGVLTDLEALGVDKAQFVEDVRRALYASKLVAYAQGFDEIKAGSDENNWDVDPRDLATIWRGGCIIRAKFLNRIVEAYDANAELESLLLDPYFKSELGDLIDSWRRVIVTATQLGLPIPVFASSLSYYDSLRAERLPAALIQGQRDFFGAHTYKRIDKDGSFHTEWSGDRSEVEA

SEQ ID NO: 21 - DNA, 1431 bp, Corynebacterium glutamicum
  CDS (1)..(1431): RXA01093W
atgggcgtggatagacgaactaagattgtatgtaccctaggcccagcggtggctagtgcagatggaattctgcgtttggtagaagacggcatggatgttgctcgcctcaacttctcccatggtgaccacccagatcatgagcaaaactacaagtgggtccgcgaggcggcggagaagactggccgtgcagtcggtattctcgcagacctccaaggaccgaagatccgtcttggccgtttcactgacggcgcaaccgtgtgggaaaacggcgagaccattcggatcaccgttgacgatgtagagggaacgcacgatcgtgtgtccaccacctacaagaatctggcaaaagacgcgaagccaggcgaccgcctgctcgttgatgacggcaaggttggcctcgtctgcgtttccgtcgaaggtaacgacgtcatctgtgaggttgttgagggcggaccagtctccaacaacaagggtgtttccctgccaggtatggatatttccgtacctgcactgtccgaaaaggatatccgtgacctgcgcttcgccctgaagctcggcgtggactttattgcactgtccttcgtacgttccccagcagatgctgaactcgttcacaagatcatggacgaagaaggtcgtcgtgttcctgtgatcgccaagctggaaaagccagaggctgtcacctccctcgagccaatcgtgttggcattcgacgccgtcatggttgctcgtggtgacctcggcgttgaggttcctctggaggaggttccactggttcagaagcgcgcaatccagattgcccgtgagaacgcaaagccagttatcgtggcaacccagatgctggattccatgattgagaactcccgcccaacccgtgcggaagcttctgacgtggcaaacgctgtgctcgatggcgcagatgctgtcatgctttctggtgaaacttcagtgggcaaagatccgcacaacgttgtgcgcaccatgtctcgcattgttcgcttcgctgaaaccgacggtcgcgtcccagacctgacccacatccctcgcactaagcgtggcgttatttcctactctgcacgtgatatcgccgagcgcctcaacgctcgtgcattggttgcgttcaccacctctggtgataccgcaaagcgtgtggctcgtctgcacagccacctgccactgctcgtgttcactccaaatgaggcagttcgctctgagctggcgctgacctggggtgcaaccaccttcctgtgtccacctgtcagcgataccgatgacatgatgcgcgaagtcgaccgtgctcttttagcaatgcctgagtacaacaagggtgacatgatggttgttgttgcaggttcccctcctggtgttaccggtaacaccaacatgattcacgtccaccttcttggtgacgacacaaggattgcaaagctc

SEQ ID NO: 22 - protein, 477 aa, Corynebacterium glutamicum
MGVDRRTKIVCTLGPAVASADGILRLVEDGMDVARLNFSHGDHPDHEQNYKWVREAAEKTGRAVGILADLQGPKIRLGRFTDGATVWENGETIRITVDDVEGTHDRVSTTYKNLAKDAKPGDRLLVDDGKVGLVCVSVEGNDVICEVVEGGPVSNNKGVSLPGMDISVPALSEKDIRDLRFALKLGVDFIALSFVRSPADAELVHKIMDEEGRRVPVIAKLEKPEAVTSLEPIVLAFDAVMVARGDLGVEVPLEEVPLVQKRAIQIARENAKPVIVATQMLDSMIENSRPTRAEASDVANAVLDGADAVMLSGETSVGKDPHNVVRTMSRIVRFAETDGRVPDLTHIPRTKRGVISYSARDIAERLNARALVAFTTSGDTAKRVARLHSHLPLLVFTPNEAVRSELALTWGATTFLCPPVSDTDDMMREVDRALLAMPEYNKGDMMVVVAGSPPGVTGNTNMIHVHLLGDDTRIAKL

SEQ ID NO: 23 - DNA, 1704 bp, Corynebacterium glutamicum
  CDS (1)..(1704): RXA01244W
gtggctactgtggctgatgtgaatcaagacactgtactgaagggcaccggcgttgtcggtggagtccgttatgcaagcgcggtgtggattaccccacgccccgaactaccccaagcaggcgaagtcgtcgccgaagaaaaccgtgaagcagagcaggagcgtttcgacgccgctgcagccacagtctcttctcgtttgcttgagcgctccgaagctgctgaaggaccagcagctgaggtgcttaaagctactgctggcatggtcaatgaccgtggctggcgtaaggctgtcatcaagggtgtcaagggtggtcaccctgcggaatacgccgtggttgcagcaacaaccaagttcatctccatgttcgaagccgcaggcggcctgatcgcggagcgcaccacagacttgcgcgacatccgcgaccgcgtcatcgcagaacttcgtggcgatgaagagccaggtctgccagctgtttccggacaggtcattctctttgcagatgacctctccccagcagacaccgcggcactagacacagatctctttgtgggacttgtcactgagctgggtggcccaacgagccacaccgcgatcatcgcacgccagctcaacgtgccttgcatcgtcgcatccggcgccggcatcaaggacatcaagtccggcgaaaaggtgcttatcgacggcagcctcggcaccattgaccgcaacgcggacgaagctgaagcaaccaagctcgtctccgagtccctcgagcgcgctgctcgcatcgccgagtggaagggtcctgcacaaaccaaggacggctaccgcgttcagctgttggccaacgtccaagacggcaactctgcacagcaggctgcacagaccgaagcagaaggcatcggcctgttccgcaccgaactgtgcttcctttccgccaccgaagagccaagcgttgatgagcaggctgcggtctactcaaaggtgcttgaagcattcccagagtccaaggtcgttgtccgctccctcgacgcaggttctgacaagccagttccattcgcatcgatggctgatgagatgaacccagcactgggtgttcgtggcctgcgtatcgcacgtggacaggttgatctgctgactcgccagctcgacgcaattgcgaaggccagcgaagaactcggccgtggcgacgacgccccaacctgggttatggctccaatggtggctaccgcttatgaagcaaagtggtttgctgacatgtgccgtgagcgtggcctaatcgccggcgccatgatcgaagttccagcagcatccctgatggcagacaagatcatgcctcacctggactttgtttccatcggtaccaacgacctgacccagtacaccatggcagcggaccgcatgtctcctgagcttgcctacctgaccgatccttggcagccagcagtcctgcgcctgatcaagcacacctgtgacgaaggtgctcgctttaacaccccggtcggtgtttgtggtgaagcagcagcagacccactgttggcaactgtcctcaccggtcttggcgtgaactccctgtccgcagcatccactgctctcgcagcagtcggtgcaaagctgtcagaggtcaccctggaaacctgtaagaaggcagcagaagcagcacttgacgctgaaggtgcaactgaagcacgcgatgctgtacgcgcagtgatcgacgcagcagtc

SEQ ID NO: 24 - protein, 568 aa, Corynebacterium glutamicum
MATVADVNQDTVLKGTGVVGGVRYASAVWITPRPELPQAGEVVAEENREAEQERFDAAAATVSSRLLERSEAAEGPAAEVLKATAGMVNDRGWRKAVIKGVKGGHPAEYAVVAATTKFISMFEAAGGLIAERTTDLRDIRDRVIAELRGDEEPGLPAVSGQVILFADDLSPADTAALDTDLFVGLVTELGGPTSHTAIIARQLNVPCIVASGAGIKDIKSGEKVLIDGSLGTIDRNADEAEATKLVSESLERAARIAEWKGPAQTKDGYRVQLLANVQDGNSAQQAAQTEAEGIGLFRTELCFLSATEEPSVDEQAAVYSKVLEAFPESKVVVRSLDAGSDKPVPFASMADEMNPALGVRGLRIARGQVDLLTRQLDAIAKASEELGRGDDAPTWVMAPMVATAYEAKWFADMCRERGLIAGAMIEVPAASLMADKIMPHLDFVSIGTNDLTQYTMAADRMSPELAYLTDPWQPAVLRLIKHTCDEGARFNTPVGVCGEAAADPLLATVLTGLGVNSLSAASTALAAVGAKLSEVTLETCKKAAEAALDAEGATEARDAVRAVIDAAV

SEQ ID NO: 25 - DNA, 3327 bp, Corynebacterium glutamicum
  CDS (1)..(3249): RXA01434E
gtgagttcttcgctttcgaataattcggagcagtccggcctgcgtggcaggatcgttgctccagcaccgccggcgcctgtgcccgaggcgcgcaagaaggctgtcgcacgcacggatggtgatcgctcgagtttgaaaaactcgcctacggcatccgccacccaggcagcccagacgcgcccggcagaaccggaaccaaaaaagcacacctccgattctgatgtggtgcgctcgactggctccatggcaatagccacgctgctgagtcgtatcaccggtttcctgcgcaccgtgatgattggtgcggcgctgtcgccggccatcgcttcggcgttcaacactgccaacacgctgcccaacctgatcactgaaatcgtgttgggtgcggtgctgacatcgctggttattccggtccttacccgcgcggaaaaagaagacgccgacggcggttccgggttcttcaggcggctgctcaccctgtcggtgacgctgctgggtggtgtcaccatcctgtcgattatcggcgcgccgctgctgacacggatgatgctgtcctctgagggacaagtcaacgtggtcatgtccacggcctttgcgtattggctgctgccacagattttcttctacggcctgtttgccctgttcatggctgtgttgaacacccgtgaagtgttcaaacccggcgcgtgggcacctgttgtcaacaatgtgatcaccttgaccgtgctgggcgtgtacatggtgctgcctgcgcgtttgcacccgcatgagcaggtgggcatttttgatccgcagatcattttcctcggcgtgggcaccacccttggtgtggttgcacagtgtctaatcatgattccgtacctgcgtcgcgcgggcattgatatgcgccctctgtggggtatcgatgcgcgtttgaagcaattcggtggcatggcgatggcgatcatcgtgtacgtggcaatctcccagttcggttacatcatcaccactcgcattgcgtcgattgcagacgatgctgcgccgtttatttatcagcagcactggatgttgctgcaagttccttatggcatcatcggcgtcaccttgctcaccgcgattatgccgcgactgtcccgcaacgcggcagacggcgatgatagggcagtagtctctgaccttcagttgggttccaagctaaccttcatcgcactgatccccatcgtggtgttcttcaccgccttcggtgtccctattgccaatggcctttttgcctacggccaattcgatgccaacgccgccaacatccttggttggactctgagcttctctgctttcacgctgattccttacgctttggtgctgctacatctgcgtgtgttttatgcgcgtgaagaggtctggaccccaaccttcatcatcgccggcatcaccgccaccaaggtcgtgctttccctgttggcaccgctgctgtcgagctccccggagcgtgtggtggtgcttcttggtgcggccaacggtttcagtttcatcaccggcgcggtcatcggcgcgtatctgttgcgcaacaaactcggcctgttgggtatgcgctctttggctaaaacctccctgtgggcgttgggctctgcggcggttggtgcagcagcagcatgggcgttggggtggctgattcaagccgtcgtgggcgatttcttgctgggcactctaagctccgtaggctacttgttgaacctggctgtgttgggtgtcttcttcatcttcgtcaccggcatcgtgttgtcacgttctggtttgccggaggtccaaaacttgggccaggcactgacccgcatcccaggtttgagccggtttattcgcccgaataccaagatctctttggatgtcggcgaagtctccgagcaggatttctccacccagctggtcgcgccaagcgagttcgcagcaacccctgtgccgccaccgatgtccgccggtattgtccgcggacctcgcctggttcccggcgccccagtcggcgacggtcgtttccgtctgctcgccgatcacggcggcgtccaaggcgcgcgtttctggcaggcccgcgagatcgccaccggcaaggaagtcgcgctgatctttgtggatacttccggcaacgccccatttgcgccactgtcttcggcagccgcagcgggcatcgcctacgaggtgcagcgccgcaccaagaagctggccagcttgggcagcttggcggtagcccccaacatccactccgaggcgtaccgcaacggttgcctcattgtggccgattgggtgcctggctccagcttgagcgccgtcgcggaatccggtgccgatccccgcgccgccgcgttcgcgctcgcggaactaactgaaaccatcggcgaggcccacgagatgggtatcccggccggcttggacaacaagtgccgcatccgcatcaacaccgacggccatgccgtcctcgccttcccggcgattttgcccgatgcctcagagctccgcgacgccaagtccctggcctcggccgccgagatgcttatcgacgcgaccctcgctcccagcgacgtcaaggcaatggtcactgaagcccaggggctagctacagaagacaatcccgattacgcatcacttgccatggcgatgcgcacctgcggactgttcaccgaggaaccaacccaccttgtggtgaagaaggaaaagacaccaaagcctgcgacacgtgatggtttcggtgcctccgactacaccgtcaagggcatggcagccatcgccgctgtggtgatcatcttggtttccctggtggccgccggtaccgcgttcctcaccagcttcttcggcagcagcaccaacgaacaatccccgttggcctctgttgaagccaccacctctgcaacaccagaacctgtggggccaccggtctacctggatctggatcaagcccgcacgtgggatgacggtgcaggaacagatgtcaccgacgtcaccgacggcaacacctccaccgcatggacctccaccggcggcgacggcctcctagttgacctgtccacgcctgcccgcctcgaccgcgtcatcttgaccaccggcaccggctccgacagcaacgtgacctcgaccgtgaagatctacgcattcaacgacgcctcaccacactccctgtcggaaggcatcgagatcggcaccgtggattattccggccgcagtctcagccacagcatccgcgattcctccaagcttccgggtcaggtggaatccgtggtgattctggtcgatgaggttcgttcctcacaaacctcagacaccaatccacagatgcagatcgctgaagtacaacttgttggttgg

SEQ ID NO: 26 - protein, 1083 aa, Corynebacterium glutamicum
MSSSLSNNSEQSGLRGRIVAPAPPAPVPEARKKAVARTDGDRSSLKNSPTASATQAAQTRPAEPEPKKHTSDSDVVRSTGSMAIATLLSRITGFLRTVMIGAALSPAIASAFNTANTLPNLITEIVLGAVLTSLVIPVLTRAEKEDADGGSGFFRRLLTLSVTLLGGVTILSIIGAPLLTRMMLSSEGQVNVVMSTAFAYWLLPQIFFYGLFALFMAVLNTREVFKPGAWAPVVNNVITLTVLGVYMVLPARLHPHEQVGIFDPQIIFLGVGTTLGVVAQCLIMIPYLRRAGIDMRPLWGIDARLKQFGGMAMAIIVYVAISQFGYIITTRIASIADDAAPFIYQQHWMLLQVPYGIIGVTLLTAIMPRLSRNAADGDDRAVVSDLQLGSKLTFIALIPIVVFFTAFGVPIANGLFAYGQFDANAANILGWTLSFSAFTLIPYALVLLHLRVFYAREEVWTPTFIIAGITATKVVLSLLAPLLSSSPERVVVLLGAANGFSFITGAVIGAYLLRNKLGLLGMRSLAKTSLWALGSAAVGAAAAWALGWLIQAVVGDFLLGTLSSVGYLLNLAVLGVFFIFVTGIVLSRSGLPEVQNLGQALTRIPGLSRFIRPNTKISLDVGEVSEQDFSTQLVAPSEFAATPVPPPMSAGIVRGPRLVPGAPVGDGRFRLLADHGGVQGARFWQAREIATGKEVALIFVDTSGNAPFAPLSSAAAAGIAYEVQRRTKKLASLGSLAVAPNIHSEAYRNGCLIVADWVPGSSLSAVAESGADPRAAAFALAELTETIGEAHEMGIPAGLDNKCRIRINTDGHAVLAFPAILPDASELRDAKSLASAAEMLIDATLAPSDVKAMVTEAQGLATEDNPDYASLAMAMRTCGLFTEEPTHLVVKKEKTPKPATRDGFGASDYTVKGMAAIAAVVIILVSLVAAGTAFLTSFFGSSTNEQSPLASVEATTSATPEPVGPPVYLDLDQARTWDDGAGTDVTDVTDGNTSTAWTSTGGDGLLVDLSTPARLDRVILTTGTGSDSNVTSTVKIYAFNDASPHSLSEGIEIGTVDYSGRSLSHSIRDSSKLPGQVESVVIL

SEQ ID NO: 27 - DNA, 3249 bp, Corynebacterium glutamicum
  CDS (1)..(3249): RXA01434K
gtgcccgaggcgcgcaagaaggctgtcgcacgcacggatggtgatcgctcgagtttgaaaaactcgcctacggcatccgccacccaggcagcccagacgcgcccggcagaaccggaaccagaaaagcacacctccgattctgatgtggtgcgctcgactggctccatggcaatagccacgctgctgagtcgtatcaccggtttcctgcgcaccgtgatgattggtgcggcgctgtcgccggccatcgcttcggcgttcaacactgccaacacgctgcccaacctgatcactgaaatcgtgttgggtgcggtgctgacatcgctggttattccggtccttacccgcgcggaaaaagaagacgccgacggcggttccgggttcttcaggcggctgctcaccctgtcggtgacgctgctgggtggtgtcaccatcctgtcgattatcggcgcgccgctgctgacacggatgatgctgtcctctgagggacaagtcaacgtggtcatgtccacggcctttgcgtattggctgctgccacagattttcttctacggcctgtttgccctgttcatggctgtgttgaacacccgtgaagtgttcaaacccggcgcgtgggcacctgttgtcaacaatgtgatcaccttgaccgtgctgggcgtgtacatggtgctgcctgcgcgtttgcacccgcatgagcaggtgggcatttttgatccgcagatcattttcctcggcgtgggcaccacccttggtgtggttgcacagtgtctaatcatgattccgtacctgcgtcgcgcgggcattgatatgcgccctctgtggggtatcgatgcgcgtttgaagcaattcggtggcatggcgatggcgatcatcgtgtacgtggcaatctcccagttcggttacatcatcaccactcgcattgcgtcgattgcagacgatgctgcgccgtttatttatcagcagcactggatgttgctgcaagttccttatggcatcatcggcgtcaccttgctcaccgcgattatgccgcgactgtcccgcaacgcggcagacggcgatgatagggcagtagtctctgaccttcagttgggttccaagctaaccttcatcgcactgatccccatcgtggtgttcttcaccgccttcggtgtccctattgccaatggcctttttgcctacggccaattcgatgccaacgccgccaacatccttggttggactctgagcttctctgctttcacgctgattccttacgctttggtgctgctacatctgcgtgtgttttatgcgcgtgaagaggtctggaccccaaccttcatcatcgccggcatcaccgccaccaaggtcgtgctttccctgttggcaccgctgctgtcgagctccccggagcgtgtggtggtgcttcttggtgcggccaacggtttcagtttcatcaccggcgcggtcatcggcgcgtatctgttgcgcaacaaactcggcctgttgggtatgcgctctttggctaaaacctccctgtgggcgttgggctctgcggcggttggtgcagcagcagcatgggcgttggggtggctgattcaagccgtcgtgggcgatttcttgctgggcactctaagctccgtaggctacttgttgtacctggctgtgttgggtgtcttcttcatcttcgtcaccggcatcgtgttgtcacgttctggtttgccggaggtccaaaacttgggccaggcactgacccgcatcccaggtttgagccggtttattcgcccgaataccaagatctctttggatgtcggcgaagtctccgagcaggatttctccacccagctggtcgcgccaagcgagttcgcagcaacccctgtgccgccaccgatgtccgccggtattgtccgcggacctcgcctggttcccggcgccccagtcggcgacggtcgtttccgtctgctcgccgatcacggcggcgtccaaggcgcgcgtttctggcaggcccgcgagatcgccaccggcaaggaagtcgcgctgatctttgtggatacttccggcaacgccccatttgcgccactgtcttcggcagccgcagcgggcatcgcctacgaggtgcagcgccgcaccaagaagctggccagcttgggcagcttggcggtagcccccaacatccactccgaggcgtaccgcaacggttgcctcattgtggccgattgggtgcctggctccagcttgagcgccgtcgcggaatccggtgccgatccccgcgccgccgcgttcgcgctcgcggaactaactgaaaccatcggcgaggcccacgagatgggtatcccggccggcttggacaacaagtgccgcatccgcatcaacaccgacggccatgccgtcctcgccttcccggcgattttgcccgatgcctcagagctccgcgacgccaagtccctggcctcggccgccgagatgcttatcgacgcgaccctcgctcccagcgacgtcaaggcaatggtcactgaagcccaggggctagctacagaagacaatcccgattacgcatcacttgccatggcgatgcgcacctgcggactgttcaccgaggaaccaacccaccttgtggtgaagaaggaaaagacaccaaagcctgcgacacgtgatggtttcggtgcctccgactacaccgtcaagggcatggcagccatcgccgctgtggtgatcatcttggtttccctggtggccgccggtaccgcgttcctcaccagcttcttcggcagcagcaccaacgaacaatccccgttggcctctgttgaagccaccacctctgcaacaccagaacctgtggggccaccggtctacctggatctggatcaagcccgcacgtgggatgacggtgcaggaacagatgtcaccgacgtcaccgacggcaacacctccaccgcatggacctccaccggcggcgacggcctcctagttgacctgtccacgcctgcccgcctcgaccgcgtcatcttgaccaccggcaccggctccgacagcaacgtgacctcgaccgtgaagatctacgcattcaacgacgcctcaccacactccctgtcggaaggcatcgagatcggcaccgtggattattccggccgcagtctcagccacagcatccgcgattcctccaagcttccgggtcaggtggaatccgtggtgattctggtcgatgaggttcgttcctcacaaacctcagacaccaatccacagatgcagatcgctgaagtacaacttgttggttgg

SEQ ID NO: 28 - protein, 1083 aa, Corynebacterium glutamicum
MPEARKKAVARTDGDRSSLKNSPTASATQAAQTRPAEPEPEKHTSDSDVVRSTGSMAIATLLSRITGFLRTVMIGAALSPAIASAFNTANTLPNLITEIVLGAVLTSLVIPVLTRAEKEDADGGSGFFRRLLTLSVTLLGGVTILSIIGAPLLTRMMLSSEGQVNVVMSTAFAYWLLPQIFFYGLFALFMAVLNTREVFKPGAWAPVVNNVITLTVLGVYMVLPARLHPHEQVGIFDPQIIFLGVGTTLGVVAQCLIMIPYLRRAGIDMRPLWGIDARLKQFGGMAMAIIVYVAISQFGYIITTRIASIADDAAPFIYQQHWMLLQVPYGIIGVTLLTAIMPRLSRNAADGDDRAVVSDLQLGSKLTFIALIPIVVFFTAFGVPIANGLFAYGQFDANAANILGWTLSFSAFTLIPYALVLLHLRVFYAREEVWTPTFIIAGITATKVVLSLLAPLLSSSPERVVVLLGAANGFSFITGAVIGAYLLRNKLGLLGMRSLAKTSLWALGSAAVGAAAAWALGWLIQAVVGDFLLGTLSSVGYLLYLAVLGVFFIFVTGIVLSRSGLPEVQNLGQALTRIPGLSRFIRPNTKISLDVGEVSEQDFSTQLVAPSEFAATPVPPPMSAGIVRGPRLVPGAPVGDGRFRLLADHGGVQGARFWQAREIATGKEVALIFVDTSGNAPFAPLSSAAAAGIAYEVQRRTKKLASLGSLAVAPNIHSEAYRNGCLIVADWVPGSSLSAVAESGADPRAAAFALAELTETIGEAHEMGIPAGLDNKCRIRINTDGHAVLAFPAILPDASELRDAKSLASAAEMLIDATLAPSDVKAMVTEAQGLATEDNPDYASLAMAMRTCGLFTEEPTHLVVKKEKTPKPATRDGFGASDYTVKGMAAIAAVVIILVSLVAAGTAFLTSFFGSSTNEQSPLASVEATTSATPEPVGPPVYLDLDQARTWDDGAGTDVTDVTDGNTSTAWTSTGGDGLLVDLSTPARLDRVILTTGTGSDSNVTSTVKIYAFNDASPHSLSEGIEIGTVDYSGRSLSHSIRDSSKLPGQVESVVILVDEVRSSQTSDTNPQMQIAEVQLVGW

SEQ ID NO: 29 - DNA, 3723 bp, Corynebacterium glutamicum
  CDS (1)..(3723): RXA02056E
gtggataaaacaaagctcaataaaccctcaagaagcaaggaaaagaggcgagtacctgccgtgagcagcgctagtactttcggccagaatgcgtggctggtagacgagatgttccagcagttccagaaggaccccaagtccgtggacaaggaatggagagaactctttgaggcgcaggggggaccaaatactacccccgctacaacagaagcacagccttcagcgcccaaggagtctgcgaaaccagcaccaaaggctgcccctgcagccaaggcagcaccgcgcgtagaaaccaagccggccgacaagaccgcccctaaggccaaggagtcctcagtgccacagcaacctaagcttccggagccaggacaaaccccaatcaggggtattttcaagtccatcgcgaagaacatggatatctccctggaaatcccaaccgcaacctcggttcgcgatatgccagctcgcctcatgttcgaaaaccgcgcgatggtcaacgatcagctcaagcgcacccgcggtggcaagatctccttcacccacatcattggctacgccatggtgaaggcagtcatggctcacccggacatgaacaactcctacgacgtcatcgacggcaagccaaccctgatcgtgcctgagcacatcaacctgggccttgctatcgaccttcctcagaaggacggctcccgcgcacttgtcgtagcagccatcaaggaaaccgagaagatgaacttctccgagttcctcgcagcctacgaagacatcgtggcacgctcccgcaagggcaagctcaccatggatgactaccagggcgttaccgtttccttgaccaacccaggtggcatcggtacccgccactctgttccacgtctaaccaagggccagggcaccatcatcggtgtcggttccatggattacccagcagagttccagggcgcttcagaagaccgccttgcagagctcggcgttggcaaacttgtcaccatcacctccacctacgatcaccgcgtgatccagggtgctgtgtccggtgaattcctgcgcaccatgtctcgcctgctcaccgatgattccttctgggatgagatcttcgacgcaatgaacgttccttacaccccaatgcgttgggcacaggacgttccaaacaccggtgttgataagaacacccgcgtcatgcagctcattgaggcataccgctcccgtggacacctcatcgctgacaccaacccactttcatgggttcagcctggcatgccagttccagaccaccgcgacctcgacatcgagacccacaacctgaccatctgggatctggaccgtaccttcaacgtcggtggcttcggcggcaaggagaccatgaccctgcgcgaggtactgtcccgcctccgcgctgcgtacaccctcaaggtcggctccgaatacacccacatcctggaccgcgacgagcgcacctggctgcaggaccgcctcgaggccggaatgccaaagccaacccaggcagagcagaagtacatcctgcagaagctgaacgccgcggaggctttcgagaacttcctgcagaccaagtacgtcggccagaagcgcttctccctcgaaggtgcagaagcacttatcccactgatggactccgccatcgacaccgccgcaggccaaggcctcgacgaagttgtcatcggtatgccacaccgtggtcgcctcaacgtgctgttcaacatcgtgggcaagccactggcatccatcttcaacgagtttgaaggccaaatggagcagggccagatcggtggctccggtgacgtgaagtaccacctcggttccgaaggccagcacctgcagatgttcggcgacggcgagatcaaggtctccctgactgctaacccgtcccacctggaagctgttaacccagtgatggaaggtatcgtccgcgcaaagcaggactacctggacaagggcgtagacggcaagactgttgtgccactgctgctccacggtgacgctgcattcgcaggcctgggcatcgtgccagaaaccatcaacctggctaagctgcgtggctacgacgtcggcggcaccatccacatcgtggtgaacaaccagatcggcttcaccaccaccccagactccagccgctccatgcactacgcaaccgactacgccaaggcattcggctgcccagtcttccacgtcaacggcgacgacccagaggcagttgtctgggttggccagctggccaccgagtaccgtcgtcgcttcggcaaggacgtcttcatcgacctcgtctgctaccgcctccgcggccacaacgaagctgatgatccttccatgacccagccaaagatgtatgagctcatcaccggccgcgagaccgttcgtgctcagtacaccgaagacctgctcggacgtggagacctctccaacgaagatgcagaagcagtcgtccgcgacttccacgaccagatggaatctgtgttcaacgaagtcaaggaaggcggcaagaagcaggctgaggcacagaccggcatcaccggctcccagaagcttccacacggccttgagaccaacatctcccgtgaagagctcctggaactgggacaggctttcgccaacaccccagaaggcttcaactaccacccacgtgtggctcccgttgctaagaagcgcgtctcctctgtcaccgaaggtggcatcgactgggcatggggcgagctcctcgccttcggttccctggctaactccggccgcttggttcgccttgcaggtgaagattcccgccgcggtaccttcacccagcgccacgcagttgccatcgacccagcgaccgctgaagagttcaacccactccacgagcttgcacagtccaagggcaacaacggtaagttcctggtctacaactccgcactgaccgagtacgcaggcatgggcttcgagtacggctactccgtaggaaacgaagactccatcgttgcatgggaagcacagttcggcgacttcgccaacggcgctcagaccatcatcgatgagtacgtctcctcaggcgaagctaagtggggccagacctccaagctgatccttctgctgcctcacggctacgaaggccagggcccagaccactcttccgcacgtatcgagcgcttcctgcagctgtgcgctgagggttccatgactgttgctcagccatccaccccagcaaaccacttccacctactgcgtcgtcacgctctgtccgacctgaagcgtccactggttatcttcaccccgaagtccatgctgcgtaacaaggctgctgcctccgcaccagaagacttcactgaggtcaccaagttccagtccgtgatcaacgatccaaacgttgcagatgcagccaaggtgaagaaggtcatgctggtctccggcaagctgtactacgaattggcaaagcgcaaggagaaggacggacgcgacgacatcgcgatcgttcgtatcgaaatgctccacccaattccgttcaaccgcatctccgaggctcttgccggctaccctaacgctgaggaagtcctcttcgttcaggatgagccagcaaaccagggcccatggccgttctaccaggagcacctcccagagctgatcccgaacatgccaaagatgcgccgcgtttcccgccgcgctcagtcctccaccgcaactggtgttgccaaggtgcaccagctggaggagaagcagcttatcgacgaggctttcgaggct

SEQ ID NO: 30 - protein, 1241 aa, Corynebacterium glutamicum
MDKTKLNKPSRSKEKRRVPAVSSASTFGQNAWLVDEMFQQFQKDPKSVDKEWRELFEAQGGPNTTPATTEAQPSAPKESAKPAPKAAPAAKAAPRVETKPADKTAPKAKESSVPQQPKLPEPGQTPIRGIFKSIAKNMDISLEIPTATSVRDMPARLMFENRAMVNDQLKRTRGGKISFTHIIGYAMVKAVMAHPDMNNSYDVIDGKPTLIVPEHINLGLAIDLPQKDGSRALVVAAIKETEKMNFSEFLAAYEDIVARSRKGKLTMDDYQGVTVSLTNPGGIGTRHSVPRLTKGQGTIIGVGSMDYPAEFQGASEDRLAELGVGKLVTITSTYDHRVIQGAVSGEFLRTMSRLLTDDSFWDEIFDAMNVPYTPMRWAQDVPNTGVDKNTRVMQLIEAYRSRGHLIADTNPLSWVQPGMPVPDHRDLDIETHNLTIWDLDRTFNVGGFGGKETMTLREVLSRLRAAYTLKVGSEYTHILDRDERTWLQDRLEAGMPKPTQAEQKYILQKLNAAEAFENFLQTKYVGQKRFSLEGAEALIPLMDSAIDTAAGQGLDEVVIGMPHRGRLNVLFNIVGKPLASIFNEFEGQMEQGQIGGSGDVKYHLGSEGQHLQMFGDGEIKVSLTANPSHLEAVNPVMEGIVRAKQDYLDKGVDGKTVVPLLLHGDAAFAGLGIVPETINLAKLRGYDVGGTIHIVVNNQIGFTTTPDSSRSMHYATDYAKAFGCPVFHVNGDDPEAVVWVGQLATEYRRRFGKDVFIDLVCYRLRGHNEADDPSMTQPKMYELITGRETVRAQYTEDLLGRGDLSNEDAEAVVRDFHDQMESVFNEVKEGGKKQAEAQTGITGSQKLPHGLETNISREELLELGQAFANTPEGFNYHPRVAPVAKKRVSSVTEGGIDWAWGELLAFGSLANSGRLVRLAGEDSRRGTFTQRHAVAIDPATAEEFNPLHELAQSKGNNGKFLVYNSALTEYAGMGFEYGYSVGNEDSIVAWEAQFGDFANGAQTIIDEYVSSGEAKWGQTSKLILLLPHGYEGQGPDHSSARIERFLQLCAEGSMTVAQPSTPANHFHLLRRHALSDLKRPLVIFTPKSMLRNKAAASAPEDFTEVTKFQSVINDPNVADAAKVKKVMLVSGKLYYELAKRKEKDGRDDIAIVRIEMLHPIPFNRISEALAGYPNAEEVLFVQDEPANQGPWPFYQEHLPELIPNMPKMRRVSRRAQSSTATGVAKVHQLEEKQLIDEAFEA

SEQ ID NO: 31 - DNA, 3771 bp, Corynebacterium glutamicum
  CDS (1)..(3771): RXA02056K
atgctacaactggggcttaggcataatcagccaacgaccaacgttacagtggataaaacaaagctcaataaaccctcaagaagcaaggaaaagaggcgagtacctgccgtgagcagcgctagtactttcggccagaatgcgtggctggtagacgagatgttccagcagttccagaaggaccccaagtccgtggacaaggaatggagagaactctttgaggcgcaggggggaccaaatactacccccgctacaacagaagcacagccttcagcgcccaaggagtctgcgaaaccagcaccaaaggctgcccctgcagccaaggcagcaccgcgcgtagaaaccaagccggccgacaagaccgcccctaaggccaaggagtcctcagtgccacagcaacctaagcttccggagccaggacaaaccccaatcaggggtattttcaagtccatcgcgaagaacatggatatctccctggaaatcccaaccgcaacctcggttcgcgatatgccagctcgcctcatgttcgaaaaccgcgcgatggtcaacgatcagctcaagcgcacccgcggtggcaagatctccttcacccacatcattggctacgccatggtgaaggcagtcatggctcacccggacatgaacaactcctacgacgtcatcgacggcaagccaaccctgatcgtgcctgagcacatcaacctgggccttgctatcgaccttcctcagaaggacggctcccgcgcacttgtcgtagcagccatcaaggaaaccgagaagatgaacttctccgagttcctcgcagcctacgaagacatcgtggcacgctcccgcaagggcaagctcaccatggatgactaccagggcgttaccgtttccttgaccaacccaggtggcatcggtacccgccactctgttccacgtctaaccaagggccagggcaccatcatcggtgtcggttccatggattacccagcagagttccagggcgcttcagaagaccgccttgcagagctcggcgttggcaaacttgtcaccatcacctccacctacgatcaccgcgtgatccagggtgctgtgtccggtgaattcctgcgcaccatgtctcgcctgctcaccgatgattccttctgggatgagatcttcgacgcaatgaacgttccttacaccccaatgcgttgggcacaggacgttccaaacaccggtgttgataagaacacccgcgtcatgcagctcattgaggcataccgctcccgtggacacctcatcgctgacaccaacccactttcatgggttcagcctggcatgccagttccagaccaccgcgacctcgacatcgagacccacaacctgaccatctgggatctggaccgtaccttcaacgtcggtggcttcggcggcaaggagaccatgaccctgcgcgaggtactgtcccgcctccgcgctgcgtacaccctcaaggtcggctccgaatacacccacatcctggaccgcgacgagcgcacctggctgcaggaccgcctcgaggccggaatgccaaagccaacccaggcagagcagaagtacatcctgcagaagctgaacgccgcggaggctttcgagaacttcctgcagaccaagtacgtcggccagaagcgcttctccctcgaaggtgcagaagcacttatcccactgatggactccgccatcgacaccgccgcaggccaaggcctcgacgaagttgtcatcggtatgccacaccgtggtcgcctcaacgtgctgttcaacatcgtgggcaagccactggcatccatcttcaacgagtttgaaggccaaatggagcagggccagatcggtggctccggtgacgtgaagtaccacctcggttccgaaggccagcacctgcagatgttcggcgacggcgagatcaaggtctccctgactgctaacccgtcccacctggaagctgttaacccagtgatggaaggtatcgtccgcgcaaagcaggactacctggacaagggcgtagacggcaagactgttgtgccactgctgctccacggtgacgctgcattcgcaggcctgggcatcgtgccagaaaccatcaacctggctaagctgcgtggctacgacgtcggcggcaccatccacatcgtggtgaacaaccagatcggcttcaccaccaccccagactccagccgctccatgcactacgcaaccgactacgccaaggcattcggctgcccagtcttccacgtcaacggcgacgacccagaggcagttgtctgggttggccagctggccaccgagtaccgtcgtcgcttcggcaaggacgtcttcatcgacctcgtctgctaccgcctccgcggccacaacgaagctgatgatccttccatgacccagccaaagatgtatgagctcatcaccggccgcgagaccgttcgtgctcagtacaccgaagacctgctcggacgtggagacctctccaacgaagatgcagaagcagtcgtccgcgacttccacgaccagatggaatctgtgttcaacgaagtcaaggaaggcggcaagaagcaggctgaggcacagaccggcatcaccggctcccagaagcttccacacggccttgagaccaacatctcccgtgaagagctcctggaactgggacaggctttcgccaacaccccagaaggcttcaactaccacccacgtgtggctcccgttgctaagaagcgcgtctcctctgtcaccgaaggtggcatcgactgggcatggggcgagctcctcgccttcggttccctggctaactccggccgcttggttcgccttgcaggtgaagattcccgccgcggtaccttcacccagcgccacgcagttgccatcgacccagcgaccgctgaagagttcaacccactccacgagcttgcacagtccaagggcaacaacggtaagttcctggtctacaactccgcactgaccgagtacgcaggcatgggcttcgagtacggctactccgtaggaaacgaagactccatcgttgcatgggaagcacagttcggcgacttcgccaacggcgctcagaccatcatcgatgagtacgtctcctcaggcgaagctaagtggggccagacctccaagctgatccttctgctgcctcacggctacgaaggccagggcccagaccactcttccgcacgtatcgagcgcttcctgcagctgtgcgctgagggttccatgactgttgctcagccatccaccccagcaaaccacttccacctactgcgtcgtcacgctctgtccgacctgaagcgtccactggttatcttcaccccgaagtccatgctgcgtaacaaggctgctgcctccgcaccagaagacttcactgaggtcaccaagttccagtccgtgatcaacgatccaaacgttgcagatgcagccaaggtgaagaaggtcatgctggtctccggcaagctgtactacgaattggcaaagcgcaaggagaaggacggacgcgacgacatcgcgatcgttcgtatcgaaatgctccacccaattccgttcaaccgcatctccgaggctcttgccggctaccctaacgctgaggaagtcctcttcgttcaggatgagccagcaaaccagggcccatggccgttctaccaggagcacctcccagagctgatcccgaacatgccaaagatgcgccgcgtttcccgccgcgctcagtcctccaccgcaactggtgttgccaaggtgcaccagctggaggagaagcagcttatcgacgaggctttcgaggct

SEQ ID NO: 32 - protein, 1257 aa, Corynebacterium glutamicum
MLQLGLRHNQPTTNVTVDKTKLNKPSRSKEKRRVPAVSSASTFGQNAWLVDEMFQQFQKDPKSVDKEWRELFEAQGGPNTTPATTEAQPSAPKESAKPAPKAAPAAKAAPRVETKPADKTAPKAKESSVPQQPKLPEPGQTPIRGIFKSIAKNMDISLEIPTATSVRDMPARLMFENRAMVNDQLKRTRGGKISFTHIIGYAMVKAVMAHPDMNNSYDVIDGKPTLIVPEHINLGLAIDLPQKDGSRALVVAAIKETEKMNFSEFLAAYEDIVARSRKGKLTMDDYQGVTVSLTNPGGIGTRHSVPRLTKGQGTIIGVGSMDYPAEFQGASEDRLAELGVGKLVTITSTYDHRVIQGAVSGEFLRTMSRLLTDDSFWDEIFDAMNVPYTPMRWAQDVPNTGVDKNTRVMQLIEAYRSRGHLIADTNPLSWVQPGMPVPDHRDLDIETHNLTIWDLDRTFNVGGFGGKETMTLREVLSRLRAAYTLKVGSEYTHILDRDERTWLQDRLEAGMPKPTQAEQKYILQKLNAAEAFENFLQTKYVGQKRFSLEGAEALIPLMDSAIDTAAGQGLDEVVIGMPHRGRLNVLFNIVGKPLASIFNEFEGQMEQGQIGGSGDVKYHLGSEGQHLQMFGDGEIKVSLTANPSHLEAVNPVMEGIVRAKQDYLDKGVDGKTVVPLLLHGDAAFAGLGIVPETINLAKLRGYDVGGTIHIVVNNQIGFTTTPDSSRSMHYATDYAKAFGCPVFHVNGDDPEAVVWVGQLATEYRRRFGKDVFIDLVCYRLRGHNEADDPSMTQPKMYELITGRETVRAQYTEDLLGRGDLSNEDAEAVVRDFHDQMESVFNEVKEGGKKQAEAQTGITGSQKLPHGLETNISREELLELGQAFANTPEGFNYHPRVAPVAKKRVSSVTEGGIDWAWGELLAFGSLANSGRLVRLAGEDSRRGTFTQRHAVAIDPATAEEFNPLHELAQSKGNNGKFLVYNSALTEYAGMGFEYGYSVGNEDSIVAWEAQFGDFANGAQTIIDEYVSSGEAKWGQTSKLILLLPHGYEGQGPDHSSARIERFLQLCAEGSMTVAQPSTPANHFHLLRRHALSDLKRPLVIFTPKSMLRNKAAASAPEDFTEVTKFQSVINDPNVADAAKVKKVMLVSGKLYYELAKRKEKDGRDDIAIVRIEMLHPIPFNRISEALAGYPNAEEVLFVQDEPANQGPWPFYQEHLPELIPNMPKMRRVSRRAQSSTATGVAKVHQLEEKQLIDEAFEA

SEQ ID NO: 33 - DNA, 1251 bp, Corynebacterium glutamicum
  CDS (1)..(1251): RXA02063E
atgcgggatagttattttgcctttatggttaagggtgtgaagggtagaccaaatgttctagcaatcgttctcgcaggtggcgagggcaaacgactttttccgttgacggaggaccgagctaagcctgcggtcccattcggcggaacttacagattgatcgactttgttttgtcgaacctggtgaactccggattcctcaagatcgcggtactgactcagtacaagtcgcattcattggataggcatatttcattgtcgtggaacgtgtctggtccaacggggcagtacattgcttctgttcctgcgcagcagcgcctgggcaagcgatggttcactggttccgcggatgcaattttgcagtctctgaacttgatctctgatgagaaaccggattatgtcatcgttttcggcgcggaccacgtgtatcgcatggacccaagccagatgctagatgagcacattgcatctggtcgcgcggtgtctgtggcaggtattcgcgttccacgtgaggaagcaactgcgtttggttgcatccagtccgatgtcgacggcaacataaccgagttcttggaaaagccagctgaccctccgggaacccctgatgatcctgacatgacttacgcgtcgatgggtaactacattttcaccactgaagccctgatccaggcgctgaaagatgatgaaaataacgagaacagtgatcatgacatgggcggagacatcattccgtacttcgtctctcgcaatgatgcgcatgtttatgatttctccggaaacattgttcctggcgcaactgagcgtgacaagggctactggcgcgacgtcggtaccattgatgcgttctacgagtgccacatggacctgatttccgtgcacccaatcttcaatctgtataactctgagtggccaatccacacgacctctgaaggtaacttgcctccggctaagttcgttcggggcggtatcgcgcagtcgtcgatggtgtcttcaggttccatcatttctgctgggactgttcgcaactccgtgctgtccaacaacgttgtcgtcgaagagggcgcaacggtggaaggtgcagtgctgatgccaggcgtgcgcatcggtaagggtgctgttgtccgccatgcgattctggacaagaacgtggttgtccgcgacggagagctcatcggtgtcgaccaagtgcgcgatgcgcagcgcttcaaggtgagcgccggcggcgtcgtggttgtcggtaagaaccaggtagtc

SEQ ID NO: 34 - protein, 417 aa, Corynebacterium glutamicum
MRDSYFAFMVKGVKGRPNVLAIVLAGGEGKRLFPLTEDRAKPAVPFGGTYRLIDFVLSNLVNSGFLKIAVLTQYKSHSLDRHISLSWNVSGPTGQYIASVPAQQRLGKRWFTGSADAILQSLNLISDEKPDYVIVFGADHVYRMDPSQMLDEHIASGRAVSVAGIRVPREEATAFGCIQSDVDGNITEFLEKPADPPGTPDDPDMTYASMGNYIFTTEALIQALKDDENNENSDHDMGGDIIPYFVSRNDAHVYDFSGNIVPGATERDKGYWRDVGTIDAFYECHMDLISVHPIFNLYNSEWPIHTTSEGNLPPAKFVRGGIAQSSMVSSGSIISAGTVRNSVLSNNVVVEEGATVEGAVLMPGVRIGKGAVVRHAILDKNVVVRDGELIGVDQVRDAQRFKVSAGGVVVVGKNQVV

SEQ ID NO: 35 - DNA, 1227 bp, Corynebacterium glutamicum
  CDS (1)..(1227): RXA02063W
atggttaagggtgtgaagggtagaccaaatgttctagcaatcgttctcgcaggtggcgagggcaaacgactttttccgttgacggaggaccgagctaagcctgcggtcccattcggcggaacttacagattgatcgactttgttttgtcgaacctggtgaactccggattcctcaagatcgcggtactgactcagtacaagtcgcattcattggataggcatatttcattgtcgtggaacgtgtctggtccaacggggcagtacattgcttctgttcctgcgcagcagcgcctgggcaagcgatggttcactggttccgcggatgcaattttgcagtctctgaacttgatctctgatgagaaaccggattatgtcatcgttttcggcgcggaccacgtgtatcgcatggacccaagccagatgctagatgagcacattgcatctggtcgcgcggtgtctgtggcaggtattcgcgttccacgtgaggaagcaactgcgtttggttgcatccagtccgatgtcgacggcaacataaccgagttcttggaaaagccagctgaccctccgggaacccctgatgatcctgacatgacttacgcgtcgatgggtaactacattttcaccactgaagccctgatccaggcgctgaaagatgatgaaaataacgagaacagtgatcatgacatgggcggagacatcattccgtacttcgtctctcgcaatgatgcgcatgtttatgatttctccggaaacattgttcctggcgcaactgagcgtgacaagggctactggcgcgacgtcggtaccattgatgcgttctacgagtgccacatggacctgatttccgtgcacccaatcttcaatctgtataactctgagtggccaatccacacgacctctgaaggtaacttgcctccggctaagttcgttcggggcggtatcgcgcagtcgtcgatggtgtcttcaggttccatcatttctgctgggactgttcgcaactccgtgctgtccaacaacgttgtcgtcgaagagggcgcaacggtggaaggtgcagtgctgatgccaggcgtgcgcatcggtaagggtgctgttgtccgccatgcgattctggacaagaacgtggttgtccgcgacggagagctcatcggtgtcgaccaagtgcgcgatgcgcagcgcttcaaggtgagcgccggcggcgtcgtggttgtcggtaagaaccaggtagtc

SEQ ID NO: 36 - protein, 409 aa, Corynebacterium glutamicum
MVKGVKGRPNVLAIVLAGGEGKRLFPLTEDRAKPAVPFGGTYRLIDFVLSNLVNSGFLKIAVLTQYKSHSLDRHISLSWNVSGPTGQYIASVPAQQRLGKRWFTGSADAILQSLNLISDEKPDYVIVFGADHVYRMDPSQMLDEHIASGRAVSVAGIRVPREEATAFGCIQSDVDGNITEFLEKPADPPGTPDDPDMTYASMGNYIFTTEALIQALKDDENNENSDHDMGGDIIPYFVSRNDAHVYDFSGNIVPGATERDKGYWRDVGTIDAFYECHMDLISVHPIFNLYNSEWPIHTTSEGNLPPAKFVRGGIAQSSMVSSGSIISAGTVRNSVLSNNVVVEEGATVEGAVLMPGVRIGKGAVVRHAILDKNVVVRDGELIGVDQVRDAQRFKVSAGGVVVVGKNQVV

SEQ ID NO: 37 - DNA, 3465 bp, Corynebacterium glutamicum
  CDS (1)..(3465): RXA02082K
atgtatttgaaatcgttgacgctcaaggggtttaagtctttcgcgtctgcgacgaccctgaaatttgagccaggcatttgtgccgtggtgggtccgaatggttcaggcaaatccaatgtggttgatgcgctggcctgggtgatgggtgaaggttctgcgaagaccttgcgtggcggcaaaatggaagatgtcatttttgctggcgcgggcgatcgtaaaccgttgggtcgcgcagaagtcacgctgaccattgataactctgatggcgcactgcccattgagtacaccgaagtgtcggtgaccagacggatgttccgtgatggtgcaagtgaatatgagatcaatggggcgaaagctcgattgatggatatccaggagctgttgtcggataccggtattggccgtgaaatgcacatcatggtggggcagggaaagctcgcagagattttggagtcccgccccgaagagcgccgagcgtatatcgaagaagctgcgggtgtgctcaagcaccggcgcaggaaagaaaaggcgcagcgcaaacttcagggcatgcaggtcaatcttgatcgtttgcaggatctgacccatgagttggccaagcagctcaagccgttggctaggcaggcggaagcagcgcagcgtgcggcgacggtgcaggctgatttgcgtgatgcgcgtttccagattgctggctttgagatcgtgaagctctcggaaaagctggaaacctctactgagcgcgagaaaatgattcgtgagcaggcggaagcagcacaagagcagctggaagaagccaccacaactcagatggaagtggagatggagttggcggagatcactccgcaggctgaagctgcgcaacagttgtggtttgatttgtcttcgctggctgagcgggtgtcggcaacgatgcgtattgctgcagaccgtgcgagttcaggtgccgcggatgtgccgtatgcgggccaggatcctgatgagttgcttggtcgggccgaaactgctgacaaagaattagaagaactcgagatggccgtggaaatgaccaccgagcgtttgacctccattcaagaggaagccgaggataaggccgcgcaggctcgtgaggctgagcgtgaacacttggcgcaggtcagggcgatttctgatcgtcgtgaaggtgttgtgcgcctgcttgcatctgaggaatctttgcgcacccagcacacgtcagcagaggaggaagctgagcgactcagtgagcagcttgaggagttcatcggccgcattttggatgtggaacgtgaacgtcgcctcaccgatgagcgtaaacagggcgttgacacggatcgtgcgcccttggaagaagccctcaaacaggcaaaacatgaagccgaagcagcagagactcgtcttgaggagcttcgtactaagcgcagcgatctggaaaaagaagtatccaggttgcagtcgcgcattgagacgcttaaccaaaataggccacgttccgatgctgctgatgtggtggattacccgcagctggccacgttgattcgaccgcaacgaaacgtcgataaggctctcgctgccgccctgggtgcgcatgccgaggcgctggctggcgaggctgcggaagggctcgtcgagaagcttatcgacgccggcgttgcacgcaccatcatcgttgatggcacgcaggctggcggcgcatggcgcctggacgcgaacattccggccggggcgagctggctgctcgaccatgttgatctggatccggcgattgccggcccggtaaaccggctgcttgccgacgttgtgcttgtcgacgacccctccctcggccgccaagcaatcgaggatgatccccgtctgcgtgccgttgaccgcaatggtgtgctcatcggcgctgggtggattcaggtcggcaccgaaacctcgactgtggaaatcacagctcaaattgaggaagcagaagctcaacttgctgcggcctctgccgccttggacgacattgccggcacttttgatggcgccctccacgctgccgacaacactcgcgtcgaggtggctgcccgcaccgcagccctgcgcgaactcgacatgaccagggattccatcacccgcgatctcgcgcgcttggacaaacaacatgaggccgccgaatccgagcgcgtccgccatgttggacgcctgcatgctgcggaaacacgccgtgaagagctgcgcgaacagttagaagacatcgtcgatcgactctcccgcgtggaagacgaagaagacgctgacgaaccctcaaccaccgcccgcgaccaagcaaatgccgagctgcaacaaatccgcgccatggaaatggaagcacgccttgcccaacgcaccgccgaagagcgcgccgggcagcagcggggcaagggcgatagtctgcgacgccaggccgagcatgagcgccaagccaaaatccggcatgaacaagccatggaagcccgtcgcaggcgcacccaattggctgcagccgtgcaaaatggcgcacgcgatgtggccgagcgtgtctcagctgcccttgcccaagcagccatcgaaagagatcagcacaaccgcgacaaagcgctgctgacctcacacttagcgcgcgccaaagatgctgtgagtgctgcacgccagcacctcaatcgactcagcgacaacgcccactccatggaacttgcgcgcagccaagctcaagtgcgcatggaggaagccgttgccaaaatcaccgagcaacttggcattccggtcgcagaattgctgcgcgattacaccccagatgaaaactttgatgaaaagttccaacgggcacgcctcaaacaagccgaaaaagacctcgccgcactaggcaaagtcaaccccctggccttggaagaattcaaagccttggaagagcgctacgagttcctctccacccaattggccgatgtggaacaagcccgcgccgatctgagcggcgtgattgaagaagtcgatgcgaaaattctgcagcttttcaccgatgcctggaacgacgtggaagcagaattcccacgcgtgttcaacaccttgttcccaggtggcgaaggcaaactgatcctcaccgagcccgatgatttgctggcaaccggcatcgaagtggaagcccgcccaccaggaaaacgcgtcaagcgcctatcgctgctatccggtggcgaaaaatccctcaccgcactagccatgctcgtcgcgattttccgcgcccgacccagccctttctacgtgatggatgaggtggaagcagcactcgatgatgtcaaccttcgccgacttatcgcactgtttgaagagttgcgccgcgactcccagctcattgtgatcacccaccaaaaacccaccatggatgtggctaacgtactctacggcgtcaccatgcgtggcgatggcgttacccgcgtgatctcccaacgcatggaacctgcttctgcaatggaaactgtggcgggg

SEQ ID NO: 38 - protein, 1155 aa, Corynebacterium glutamicum
MYLKSLTLKGFKSFASATTLKFEPGICAVVGPNGSGKSNVVDALAWVMGEGSAKTLRGGKMEDVIFAGAGDRKPLGRAEVTLTIDNSDGALPIEYTEVSVTRRMFRDGASEYEINGAKARLMDIQELLSDTGIGREMHIMVGQGKLAEILESRPEERRAYIEEAAGVLKHRRRKEKAQRKLQGMQVNLDRLQDLTHELAKQLKPLARQAEAAQRAATVQADLRDARFQIAGFEIVKLSEKLETSTEREKMIREQAEAAQEQLEEATTTQMEVEMELAEITPQAEAAQQLWFDLSSLAERVSATMRIAADRASSGAADVPYAGQDPDELLGRAETADKELEELEMAVEMTTERLTSIQEEAEDKAAQAREAEREHLAQVRAISDRREGVVRLLASEESLRTQHTSAEEEAERLSEQLEEFIGRILDVERERRLTDERKQGVDTDRAPLEEALKQAKHEAEAAETRLEELRTKRSDLEKEVSRLQSRIETLNQNRPRSDAADVVDYPQLATLIRPQRNVDKALAAALGAHAEALAGEAAEGLVEKLIDAGVARTIIVDGTQAGGAWRLDANIPAGASWLLDHVDLDPAIAGPVNRLLADVVLVDDPSLGRQAIEDDPRLRAVDRNGVLIGAGWIQVGTETSTVEITAQIEEAEAQLAAASAALDDIAGTFDGALHAADNTRVEVAARTAALRELDMTRDSITRDLARLDKQHEAAESERVRHVGRLHAAETRREELREQLEDIVDRLSRVEDEEDADEPSTTARDQANAELQQIRAMEMEARLAQRTAEERAGQQRGKGDSLRRQAEHERQAKIRHEQAMEARRRRTQLAAAVQNGARDVAERVSAALAQAAIERDQHNRDKALLTSHLARAKDAVSAARQHLNRLSDNAHSMELARSQAQVRMEEAVAKITEQLGIPVAELLRDYTPDENFDEKFQRARLKQAEKDLAALGKVNPLALEEFKALEERYEFLSTQLADVEQARADLSGVIEEVDAKILQLFTDAWNDVEAEFPRVFNTLFPGGEGKLILTEPDDLLATGIEVEARPPGKRVKRLSLLSGGEKSLTALAMLVAIFRARPSPFYVMDEVEAALDDVNLRRLIALFEELRRDSQLIVITHQKPTMDVANVLYGVTMRGDGVTRVISQRMEPASAMETVAG

SEQ ID NO: 39 - DNA, 777 bp, Corynebacterium glutamicum
  CDS (1)..(777): RXA02016W
atgtcaaactttgaaacgttcctctgggttgcctacccctggctgtgtatcgccgcctacatcatcggcatttcttggcgctggcgcgccgaccaattcggttggaccacccactcctcccaaatctacgaatccaaactcctccgcatcgcctccccactcttccactggggcatggtgttcgtggtgatcggccacctcatgggacttgccatccccaagagctggacccaagctgtaggaatttctgacgccgcttaccacctcatcgccaccatcccaggcaccattgccggcatcgctgcagtccttggactcatcggcttgattatccgtcgcgtgatcaacaaaaccgtcttcctgtccacctcacgctccgacaaagtgatgtatgtgctactcggcgctgcaattttgtccggtttcatcgccaccgtctccacccaggtcttcggcggcgcacacggctacgactaccgcgaaaccatctccccatgggtgcgccaactgctcatcttcaacgctcaaccagagctcatggctgatgtcccttgggaattcaaggtccacatcgtcgctggattcaccctcatcgcactgtggccattcacccgcctagtccacgcgttctccgcaccagttggatacgtcacccgcccctacgtggtctatcgcacccgcgacaccacctctgaaccggcacgccaaaacgtcgcctgggaaccgatccgctcggtcaaaaatcagctcgacaatgactcgaaatggcacggcgcc

SEQ ID NO: 40 - protein, 259 aa, Corynebacterium glutamicum
MSNFETFLWVAYPWLCIAAYIIGISWRWRADQFGWTTHSSQIYESKLLRIASPLFHWGMVFVVIGHLMGLAIPKSWTQAVGISDAAYHLIATIPGTIAGIAAVLGLIGLIIRRVINKTVFLSTSRSDKVMYVLLGAAILSGFIATVSTQVFGGAHGYDYRETISPWVRQLLIFNAQPELMADVPWEFKVHIVAGFTLIALWPFTRLVHAFSAPVGYVTRPYVVYRTRDTTSEPARQNVAWEPIRSVKNQLDNDSKWHGA

SEQ ID NO: 41 - DNA, 969 bp, Corynebacterium glutamicum
  CDS (1)..(969): RXA02149W
atgccacaaaaaccggccagtttcgcggtgggctttgacatcggcggcaccaacatgcgagccgggcttgtcgacgaatccgggcgcatcgtgaccagtttgtcggcgccgtcgccgcgcacgacgcaggcaatggaacaggggatttttgatctagtcgaacagctcaaggccgaatacccggttggtgctgtgggacttgccgtcgcgggatttttggatcctgagtgcgaggttgttcgatttgccccgcaccttccttggcgcgatgagccagtgcgtgaaaagttggaaaaccttttgggcctgcctgttcgtttggaacatgatgccaactcagcagcgtggggtgagcatcgttttggtgcagctcaaggcgctgacaactgggttttgttggcactcggcactggaattggtgcagcgctgattgaaaaaggcgaaatttaccgtggtgcatatggcacggcaccagaatttggtcatttgcgtgttgttcgtggcggacgcgcatgtgcgtgtggcaaagaaggctgcctggagcgttactgttccggtactgccttggtttacactgcgcgtgaattggcttcgcatggctcattccgcaacagcgggctgtttgacaagatcaaagccgatccgaattccatcaatggaaaaacgatcactgcggcagcgcgccaagaagacccacttgctctcgccgttctggaagatttcagcgagtggctgggcgaaactttggcgatcattgctgatgtccttgacccaggcatgatcatcattggtggcggactgtccaatgctgccgacctttatttggatcgctcggtcaaccactattccacccgcatcgtcggcgcaggatatcgccctttggcacgcgttgccacagctcagttgggtgcggatgctggcatgatcggtgtcgctgatctagctcgacgctctgtagtggaagccaac

SEQ ID NO: 42 - protein, 323 aa, Corynebacterium glutamicum
MPQKPASFAVGFDIGGTNMRAGLVDESGRIVTSLSAPSPRTTQAMEQGIFDLVEQLKAEYPVGAVGLAVAGFLDPECEVVRFAPHLPWRDEPVREKLENLLGLPVRLEHDANSAAWGEHRFGAAQGADNWVLLALGTGIGAALIEKGEIYRGAYGTAPEFGHLRVVRGGRACACGKEGCLERYCSGTALVYTARELASHGSFRNSGLFDKIKADPNSINGKTITAAARQEDPLALAVLEDFSEWLGETLAIIADVLDPGMIIIGGGLSNAADLYLDRSVNHYSTRIVGAGYRPLARVATAQLGADAGMIGVADLARRSVVEAN

SEQ ID NO: 43 - DNA, 1068 bp, Corynebacterium glutamicum
  CDS (1)..(1068): RXA02206E
atggtttgtacccagccaatattttcagttgcggcaggatctgctgctgcggctaggagggttatctcttcattcacccgatctaccgtactaccttatgacctcagtagtgtggtgggcgtgaaacagcgaatggtcggttcaagtggtttgcgggtatccaggctcggtttgggcacctcaacatggggctcgggcaccgagctggctgaggcaggcgatatctttaaggcgttcatcaattctggtggcacgcttatcgacgtctcccccaactacaccaccggcgtcgcggaagaaatgctcggcacgatgttggatgcggaagtctctcgttcggctgtcgtcatttcctccagcgcaggtgtcaaccccgctctgccgctcggccgacgtgtggattgctcccgccgcaatttgattgcccaattagatgtcaccctgcgggcattaaacactgactatttggatttgtggtctgtgggctattgggatgagggcaccccaccgcatgaggtggccgatactttggattacgccgtgcgcaccggccgagtccgatatgccggtgtccgaggatattccggttggcagttagcggtcacccacgctgcatccaatcatgcagcggcctccgcccgccccgtggtcgttgcacaaaatgaatacagcctgctggaacgccgcgcagaacaagaactcctccctgccacccaacacctaggtgtcggattctttgctggcgctccgctggggcaaggcgtgctgactgctaaataccgctccgaaattccccatgattccagagctgcatccacaggacgcgacgcagaagtccaaagctacctagataatcgaggccgcatcattgtcgatgctcttgatactgcagccaaaggattaggcattagccccgctgtcacagccaccacctgggtgcgtgatcgtcccggagtgacagctgtcatcgtgggcgctcgcacacatgaacagctgtcacatcttctcaaggcggaatcggtgactttgccaacaccaatcacacaagcccttgatgatgtctccctg

SEQ ID NO: 44 - protein, 356 aa, Corynebacterium glutamicum
MVCTQPIFSVAAGSAAAARRVISSFTRSTVLPYDLSSVVGVKQRMVGSSGLRVSRLGLGTSTWGSGTELAEAGDIFKAFINSGGTLIDVSPNYTTGVAEEMLGTMLDAEVSRSAVVISSSAGVNPALPLGRRVDCSRRNLIAQLDVTLRALNTDYLDLWSVGYWDEGTPPHEVADTLDYAVRTGRVRYAGVRGYSGWQLAVTHAASNHAAASARPVVVAQNEYSLLERRAEQELLPATQHLGVGFFAGAPLGQGVLTAKYRSEIPHDSRAASTGRDAEVQSYLDNRGRIIVDALDTAAKGLGISPAVTATTWVRDRPGVTAVIVGARTHEQLSHLLKAESVTLPTPITQALDDVSL

SEQ ID NO: 45 - DNA, 948 bp, Corynebacterium glutamicum
  CDS (1)..(948): RXA02206K
gtgaaacagcgaatggtcggttcaagtggtttgcgggtatccaggctcggtttgggcacctcaacatggggctcgggcaccgagctggctgaggcaggcgatatctttaaggcgttcatcaattctggtggcacgcttatcgacgtctcccccaactacaccaccggcgtcgcggaagaaatgctcggcacgatgttggatgcggaagtctctcgttcggctgtcgtcatttcctccagcgcaggtgtcaaccccgctctgccgctcggccgacgtgtggattgctcccgccgcaatttgattgcccaattagatgtcaccctgcgggcattaaacactgactatttggatttgtggtctgtgggctattgggatgagggcaccccaccgcatgaggtggccgatactttggattacgccgtgcgcaccggccgagtccgatatgccggtgtccgaggatattccggttggcagttagcggtcacccacgctgcatccaatcatgcagcggcctccgcccgccccgtggtcgttgcacaaaatgaatacagcctgctggaacgccgcgcagaacaagaactcctccctgccacccaacacctaggtgtcggattctttgctggcgctccgctggggcaaggcgtgctgactgctaaataccgctccgaaattccccatgattccagagctgcatccacaggacgcgacgcagaagtccaaagctacctagataatcgaggccgcatcattgtcgatgctcttgatactgcagccaaaggattaggcattagccccgctgtcacagccaccacctgggtgcgtgatcgtcccggagtgacagctgtcatcgtgggcgctcgcacacatgaacagctgtcacatcttctcaaggcggaatcggtgactttgccaacaccaatcacacaagcccttgatgatgtctccctg

SEQ ID NO: 46 - protein, 316 aa, Corynebacterium glutamicum
MKQRMVGSSGLRVSRLGLGTSTWGSGTELAEAGDIFKAFINSGGTLIDVSPNYTTGVAEEMLGTMLDAEVSRSAVVISSSAGVNPALPLGRRVDCSRRNLIAQLDVTLRALNTDYLDLWSVGYWDEGTPPHEVADTLDYAVRTGRVRYAGVRGYSGWQLAVTHAASNHAAASARPVVVAQNEYSLLERRAEQELLPATQHLGVGFFAGAPLGQGVLTAKYRSEIPHDSRAASTGRDAEVQSYLDNRGRIIVDALDTAAKGLGISPAVTATTWVRDRPGVTAVIVGARTHEQLSHLLKAESVTLPTPITQALDDVSL

SEQ ID NO: 47 - DNA, 408 bp, Corynebacterium glutamicum
  CDS (1)..(408): RXA02299W
atgctgcgcaccatcctcggaagtaagattcaccgagccactgtcactcaagctgatctagattatgttggctctgtaaccatcgacgccgacctggttcacgccgccggattgatcgaaggcgaaaaagttgccatcgtagacatcaccaacggcgctcgtctggaaacttatgtcattgtgggcgacgccggaacgggcaatatttgcatcaatggtgccgctgcacaccttattaatcctggcgatcttgtgatcatcatgagctaccttcaggcaactgatgcggaagccaaggcgtatgagccaaagattgtgcacgtggacgccgacaaccgcatcgttgcgctcggcaacgatcttgcggaagcactacctggatccgggcttttgacgtcgagaagcatt

SEQ ID NO: 48 - protein, 136 aa, Corynebacterium glutamicum
MLRTILGSKIHRATVTQADLDYVGSVTIDADLVHAAGLIEGEKVAIVDITNGARLETYVIVGDAGTGNICINGAAAHLINPGDLVIIMSYLQATDAEAKAYEPKIVHVDADNRIVALGNDLAEALPGSGLLTSRSI

SEQ ID NO: 49 - DNA, 669 bp, Corynebacterium glutamicum
  CDS (1)..(669): RXA02390W
gtggagtggaccgcttttggcaccctgattctgctcaatttggtgggcagtttatccccggggcctgatacctttttcctcctccgcttagccacccgctccagagcgcacgcgatcgctggcgtcgccggcatcgtcaccggactcacggtgtgggtgacgctgacggtcgtgggagcagcggcgctgctcaccacttatccgtcgattctcggaatcatccagctcgtcggcggcacgtacctaagcttcattgggtacaagttgctgcgctcggcgtcgagagagcttatcgacgcccgccagttccgtttcaacgccgatgcccgacctatcccggatgcggtagaagcactgggaacccgcactcaggtatatcgacaaggtttggccaccaacctgtcaaaccctaaagttgtcatgtacttcgcggcaattctggctccgttgatgccagcgcacccatcaccggtgctggcgttctctatcatcgtggcgattttagtgcagacctttgttaccttctctgctgtgtgcctcattgtctctacggagcgtgtgcgcaaagcaatgctgcgtgcaggtccctggtttgacctgcttgctggcgttgtcttcctcgttgtgggtgtgactctgctgtatgaaggcctgaccggtttactcggg

SEQ ID NO: 50 - protein, 223 aa, Corynebacterium glutamicum
MEWTAFGTLILLNLVGSLSPGPDTFFLLRLATRSRAHAIAGVAGIVTGLTVWVTLTVVGAAALLTTYPSILGIIQLVGGTYLSFIGYKLLRSASRELIDARQFRFNADARPIPDAVEALGTRTQVYRQGLATNLSNPKVVMYFAAILAPLMPAHPSPVLAFSIIVAILVQTFVTFSAVCLIVSTERVRKAMLRAGPWFDLLAGVVFLVVGVTLLYEGLTGLLG

SEQ ID NO: 51 - DNA, 1344 bp, Corynebacterium glutamicum
  CDS (1)..(1344): RXA02399E
gtggtcggcaccgcccattgcgaatcagcacttaaggaagtgactttgatgtcaaacgttggaaagccacgtaccgcacaggaaatccagcaggattgggacaccaaccctcgttggaacggcatcacccgcgactacaccgcagaccaggtagctgatctgcagggttccgtcatcgaggagcacactcttgctcgccgcggctcagagatcctctgggacgcagtcacccaggaaggtgacggatacatcaacgcgcttggcgcactcaccggtaaccaggctgttcagcaggttcgtgcaggcctgaaggctgtctacctgtccggttggcaggtcgcaggtgacgccaacctctccggccacacctaccctgaccagtccctctacccagcgaactccgttccaagcgtcgttcgtcgcatcaacaacgcactgctgcgttccgatgaaatcgcacgcaccgaaggcgacacctccgttgacaactgggttgtcccaatcgtcgcggacggcgaagctggcttcggtggagcactcaacgtctacgaactccagaaggcaatgatcgcagctggcgctgcaggcacccactgggaagaccagctcgcttctgaaaagaagtgtggccacctcggcggcaaggttctgatcccaacccagcagcacatccgcaccctgaactctgcccgccttgcagcagacgttgcaaacaccccaactgttgttatcgcacgtaccgacgctgaggcagcaaccctgatcacctctgacgttgatgagcgcgaccaaccattcatcaccggtgagcgcaccgcagaaggctactaccacgtcaagaatggtctcgagccatgtatcgcacgtgcaaagtcctacgcaccatacgcagatatgatctggatggagaccggcacccctgacctggagctcgctaagaagttcgctgaaggcgttcgctctgagttcccagaccagctgctgtcctacaactgctccccatccttcaactggtctgcacacctcgaggcagatgagatcgctaagttccagaaggaactcggcgcaatgggcttcaagttccagttcatcaccctcgcaggcttccactccctcaactacggcatgttcgacctggcttacggatacgctcgcgaaggcatgacctccttcgttgacctgcagaaccgtgagttcaaggcagctgaagagcgtggcttcaccgctgttaagcaccagcgtgaggttggcgcaggctacttcgaccagatcgcaaccaccgttgacccgaactcttctaccaccgctttgaagggttccactgaagaaggccagttccacaac

SEQ ID NO: 52 - protein, 448 aa, Corynebacterium glutamicum
MVGTAHCESALKEVTLMSNVGKPRTAQEIQQDWDTNPRWNGITRDYTADQVADLQGSVIEEHTLARRGSEILWDAVTQEGDGYINALGALTGNQAVQQVRAGLKAVYLSGWQVAGDANLSGHTYPDQSLYPANSVPSVVRRINNALLRSDEIARTEGDTSVDNWVVPIVADGEAGFGGALNVYELQKAMIAAGAAGTHWEDQLASEKKCGHLGGKVLIPTQQHIRTLNSARLAADVANTPTVVIARTDAEAATLITSDVDERDQPFITGERTAEGYYHVKNGLEPCIARAKSYAPYADMIWMETGTPDLELAKKFAEGVRSEFPDQLLSYNCSPSFNWSAHLEADEIAKFQKELGAMGFKFQFITLAGFHSLNYGMFDLAYGYAREGMTSFVDLQNREFKAAEERGFTAVKHQREVGAGYFDQIATTVDPNSSTTALKGSTEEGQFHN

SEQ ID NO: 53 - DNA, 1296 bp, Corynebacterium glutamicum
  CDS (1)..(1296): RXA02399W
atgtcaaacgttggaaagccacgtaccgcacaggaaatccagcaggattgggacaccaaccctcgttggaacggcatcacccgcgactacaccgcagaccaggtagctgatctgcagggttccgtcatcgaggagcacactcttgctcgccgcggctcagagatcctctgggacgcagtcacccaggaaggtgacggatacatcaacgcgcttggcgcactcaccggtaaccaggctgttcagcaggttcgtgcaggcctgaaggctgtctacctgtccggttggcaggtcgcaggtgacgccaacctctccggccacacctaccctgaccagtccctctacccagcgaactccgttccaagcgtcgttcgtcgcatcaacaacgcactgctgcgttccgatgaaatcgcacgcaccgaaggcgacacctccgttgacaactgggttgtcccaatcgtcgcggacggcgaagctggcttcggtggagcactcaacgtctacgaactccagaaggcaatgatcgcagctggcgctgcaggcacccactgggaagaccagctcgcttctgaaaagaagtgtggccacctcggcggcaaggttctgatcccaacccagcagcacatccgcaccctgaactctgcccgccttgcagcagacgttgcaaacaccccaactgttgttatcgcacgtaccgacgctgaggcagcaaccctgatcacctctgacgttgatgagcgcgaccaaccattcatcaccggtgagcgcaccgcagaaggctactaccacgtcaagaatggtctcgagccatgtatcgcacgtgcaaagtcctacgcaccatacgcagatatgatctggatggagaccggcacccctgacctggagctcgctaagaagttcgctgaaggcgttcgctctgagttcccagaccagctgctgtcctacaactgctccccatccttcaactggtctgcacacctcgaggcagatgagatcgctaagttccagaaggaactcggcgcaatgggcttcaagttccagttcatcaccctcgcaggcttccactccctcaactacggcatgttcgacctggcttacggatacgctcgcgaaggcatgacctccttcgttgacctgcagaaccgtgagttcaaggcagctgaagagcgtggcttcaccgctgttaagcaccagcgtgaggttggcgcaggctacttcgaccagatcgcaaccaccgttgacccgaactcttctaccaccgctttgaagggttccactgaagaaggccagttccacaac

SEQ ID NO: 54 - protein, 432 aa, Corynebacterium glutamicum
MSNVGKPRTAQEIQQDWDTNPRWNGITRDYTADQVADLQGSVIEEHTLARRGSEILWDAVTQEGDGYINALGALTGNQAVQQVRAGLKAVYLSGWQVAGDANLSGHTYPDQSLYPANSVPSVVRRINNALLRSDEIARTEGDTSVDNWVVPIVADGEAGFGGALNVYELQKAMIAAGAAGTHWEDQLASEKKCGHLGGKVLIPTQQHIRTLNSARLAADVANTPTVVIARTDAEAATLITSDVDERDQPFITGERTAEGYYHVKNGLEPCIARAKSYAPYADMIWMETGTPDLELAKKFAEGVRSEFPDQLLSYNCSPSFNWSAHLEADEIAKFQKELGAMGFKFQFITLAGFHSLNYGMFDLAYGYAREGMTSFVDLQNREFKAAEERGFTAVKHQREVGAGYFDQIATTVDPNSSTTALKGSTEEGQFHN

SEQ ID NO: 55 - DNA, 2217 bp, Corynebacterium glutamicum
  CDS (1)..(2217): RXA02404K
atgactgaacaggaactgttgtctgctcagactgccgacaacgctggaactgacagcaccgaacgcgttgacgcgggcggaatgcaggttgcaaaagttctctacgactttgtaaccgaagcggtactccctcgcgtgggtgtggatgcggaaaagttctggtccggattcgccgccatcgcccgggacctcaccccacgcaaccgcgagctgcttgctcgccgcgatgaactgcagatgcttatcgacgactaccaccgcaacaactccggcaccatcgaccaagaggcgtacgaggatttcctcaaagaaatcggatacttggttgaggagccagaagctgcagaaatccgtacccaaaacgtcgatacggaaatctccagcaccgcaggacctcagctggttgttccaattctgaacgcacgcttcgcgctgaacgctgccaatgctcgctggggttccctctacgatgcgttgtacggcaccaacgccatcccagaaactgatggcgctgaaaagggcaaggagtacaacccggtccgcggccagaaggtcatcgagtggggtcgtgaattcctcgacagcgttgtcccactggacggtgcttcgcatgccgatgttgagaagtacaacatcaccgatggaaagcttgcagcccacattggagatagcgtctaccgactgaaaaaccgtgaatcctaccgtggcttcaccggcaacttccttgatccagaagcaatcctgctggaaaccaacggcctgcacatcgagctgcagatcgatcctgtccacccaatcggcaaggcagacaagactggtctcaaagacatcgttttggaatctgcgatcaccacgatcatggacttcgaagactccgttgcagctgttgatgctgaagacaagaccttaggttactctaactggttcggactcaacaccggcgaactgaaagaagagatgtccaagaacggacgcatcttcacccgtgagctcaacaaggaccgcgtctacattggccgcaatggtaccgagctggttctgcacggtcgttccctgctgttcgtccgcaacgttggtcacctcatgcaaaacccatccatcttgattgatggcgaggagatcttcgaaggcatcatggatgctgtcttgaccactgtttgtgccatcccaggaattgctccgcagaacaagatgcgcaattcccgcaagggctccatctacatcgtgaagcctaagcagcacggccctgaagaagtcgcgttcaccaacgagctcttcggccgcgttgaggatctgcttgatctgccacgccacaccttgaaggttggtgttatggatgaggagcgtcgcacgtccgtgaacctggatgccagcatcatggaagttgctgaccgcttggcattcatcaacactggcttcctggaccgcaccggcgatgaaatccacacctccatggaagcaggcgccatggtgcgcaaggctgatatgcagaccgcaccgtggaagcaggcctacgagaacaacaacgttgatgcaggtattcagcgtggtcttcctggcaaggctcagatcggtaagggcatgtgggcgatgactgaactcatggcagaaatgctggagaagaagatcggccagccacgcgaaggcgccaacactgcatgggttccttcaccaactggtgcgacgctgcacgcaacgcactaccacttggttgatgtgttcaaggttcaagacgaactgcgtgctgccggccgccgcgacagcctgcgcaacattctcaccattccaaccgcaccaaacaccaattggtctgaggaagagaagaaggaagagatggacaacaactgccagtccatcctcggatacgttgtgcgctgggttgagcacggtgttggttgctccaaggttccagacatccatgacatcgacctcatggaagaccgcgcaacgctgcgtatttcctcgcagatgctggccaactggatccgccatgatgttgtctcgaaggagcaggtcttggagtcactggaacgaatggcagtggtcgtcgacaagcaaaatgcgggcgacgaggcctaccgcgatatggcgccgaactacgacgcctccctcgccttccaggcggctaaggacttgattttcgaaggcaccaagtccccatcgggctacaccgagcccatcttgcacgcacgccgccgcgagttcaaagcaaaaaac

SEQ ID NO: 56 - protein, 739 aa, Corynebacterium glutamicum
MTEQELLSAQTADNAGTDSTERVDAGGMQVAKVLYDFVTEAVLPRVGVDAEKFWSGFAAIARDLTPRNRELLARRDELQMLIDDYHRNNSGTIDQEAYEDFLKEIGYLVEEPEAAEIRTQNVDTEISSTAGPQLVVPILNARFALNAANARWGSLYDALYGTNAIPETDGAEKGKEYNPVRGQKVIEWGREFLDSVVPLDGASHADVEKYNITDGKLAAHIGDSVYRLKNRESYRGFTGNFLDPEAILLETNGLHIELQIDPVHPIGKADKTGLKDIVLESAITTIMDFEDSVAAVDAEDKTLGYSNWFGLNTGELKEEMSKNGRIFTRELNKDRVYIGRNGTELVLHGRSLLFVRNVGHLMQNPSILIDGEEIFEGIMDAVLTTVCAIPGIAPQNKMRNSRKGSIYIVKPKQHGPEEVAFTNELFGRVEDLLDLPRHTLKVGVMDEERRTSVNLDASIMEVADRLAFINTGFLDRTGDEIHTSMEAGAMVRKADMQTAPWKQAYENNNVDAGIQRGLPGKAQIGKGMWAMTELMAEMLEKKIGQPREGANTAWVPSPTGATLHATHYHLVDVFKVQDELRAAGRRDSLRNILTIPTAPNTNWSEEEKKEEMDNNCQSILGYVVRWVEHGVGCSKVPDIHDIDLMEDRATLRISSQMLANWIRHDVVSKEQVLESLERMAVVVDKQNAGDEAYRDMAPNYDASLAFQAAKDLIFEGTKSPSGYTEPILHARRREFKAKN

SEQ ID NO: 57 - DNA, 1830 bp, Corynebacterium glutamicum
  CDS (1)..(1830): RXA02591W
atgactactgctgcaatcaggggccttcagggcgaggcgccgaccaagaataaggaactgctgaactggatcgcagacgccgtcgagctcttccagcctgaggctgttgtgttcgttgatggatcccaggctgagtgggatcgcatggcggaggatcttgttgaagccggtaccctcatcaagctcaacgaggaaaagcgtccgaacagctacctagctcgttccaacccatctgacgttgcgcgcgttgagtcccgcaccttcatctgctccgagaaggaagaagatgctggcccaaccaacaactgggctccaccacaggcaatgaaggacgaaatgtccaagcattacgctggttccatgaaggggcgcaccatgtacgtcgtgcctttctgcatgggtccaatcagcgatccggaccctaagcttggtgtgcagctcactgactccgagtacgttgtcatgtccatgcgcatcatgacccgcatgggtattgaagcgctggacaagatcggcgcgaacggcagcttcgtcaggtgcctccactccgttggtgctcctttggagccaggccaggaagacgttgcatggccttgcaacgacaccaagtacatcacccagttcccagagaccaaggaaatttggtcctacggttccggctacggcggaaacgcaatcctggcaaagaagtgctacgcactgcgtatcgcatctgtcatggctcgcgaagaaggatggatggctgagcacatgctcatcctgaagctgatcaacccagagggcaaggcgtaccacatcgcagcagcattcccatctgcttgtggcaagaccaacctcgccatgatcactccaaccatcccaggctggaccgctcaggttgttggcgacgacatcgcttggctgaagctgcgcgaggacggcctctacgcagttaacccagaaaatggtttcttcggtgttgctccaggcaccaactacgcatccaacccaatcgcgatgaagaccatggaaccaggcaacaccctgttcaccaacgtggcactcaccgacgacggcgacatctggtgggaaggcatggacggcgacgccccagctcacctcattgactggatgggcaacgactggaccccagagtccgacgaaaacgctgctcaccctaactcccgttactgcgtagcaatcgaccagtccccagcagcagcacctgagttcaacgactgggaaggcgtcaagatcgacgcaatcctcttcggtggacgtcgcgcagacaccgtcccactggttacccagacctacgactgggagcacggcaccatggttggtgcactgctcgcatccggtcagaccgcagcttccgcagaagcaaaggtcggcacactccgccacgacccaatggcaatgctcccattcattggctacaacgctggtgaatacctgcagaactggattgacatgggtaacaagggtggcgacaagatgccatccatcttcctggtcaactggttccgccgtggcgaagatggacgcttcctgtggcctggcttcggcgacaactctcgcgttctgaagtgggtcatcgaccgcatcgaaggccacgttggcgcagacgagaccgttgttggacacaccgctaaggccgaagacctcgacctcgacggcctcgacaccccaattgaggatgtcaaggaagcactgaccgctcctgcagagcagtgggcaaacgacgttgaagacaacgccgagtacctcactttcctcggaccacgtgttcctgcagaggttcacagccagttcgatgctctgaaggcccgcatttcagcagctcacgct

SEQ ID NO: 58 - protein, 610 aa, Corynebacterium glutamicum
MTTAAIRGLQGEAPTKNKELLNWIADAVELFQPEAVVFVDGSQAEWDRMAEDLVEAGTLIKLNEEKRPNSYLARSNPSDVARVESRTFICSEKEEDAGPTNNWAPPQAMKDEMSKHYAGSMKGRTMYVVPFCMGPISDPDPKLGVQLTDSEYVVMSMRIMTRMGIEALDKIGANGSFVRCLHSVGAPLEPGQEDVAWPCNDTKYITQFPETKEIWSYGSGYGGNAILAKKCYALRIASVMAREEGWMAEHMLILKLINPEGKAYHIAAAFPSACGKTNLAMITPTIPGWTAQVVGDDIAWLKLREDGLYAVNPENGFFGVAPGTNYASNPIAMKTMEPGNTLFTNVALTDDGDIWWEGMDGDAPAHLIDWMGNDWTPESDENAAHPNSRYCVAIDQSPAAAPEFNDWEGVKIDAILFGGRRADTVPLVTQTYDWEHGTMVGALLASGQTAASAEAKVGTLRHDPMAMLPFIGYNAGEYLQNWIDMGNKGGDKMPSIFLVNWFRRGEDGRFLWPGFGDNSRVLKWVIDRIEGHVGADETVVGHTAKAEDLDLDGLDTPIEDVKEALTAPAEQWANDVEDNAEYLTFLGPRVPAEVHSQFDALKARISAAHA

SEQ ID NO: 59 - DNA, 825 bp, Corynebacterium glutamicum
  CDS (1)..(825): RXA02735E
gtgagtccgactgcttgtctgaggagcttcgccacatggatccagatttgggctaccagcacgcactatccggcttgtccagcgtcaagctggaaaccgtctaaggagaaatacaacactatggttgatgtagtacgcgcacgcgatactgaagatttggttgcacaggctgcctccaaattcattgaggttgttgaagcagcaactgccaataatggcaccgcacaggtagtgctcaccggtggtggcgccggcatcaagttgctggaaaagctcagcgttgatgcggctgaccttgcctgggatcgcattcatgtgttcttcggcgatgagcgcaatgtccctgtcagtgattctgagtccaatgagggccaggctcgtgaggcactgttgtccaaggtttctatccctgaagccaacattcacggatatggtctcggcgacgtagatcttgcagaggcagcccgcgcttacgaagctgtgttggatgaattcgcaccaaacggctttgatcttcacctgctcggcatgggtggcgaaggccatatcaactccctgttccctcacaccgatgcagtcaaggaatcctccgcaaaggtcatcgcggtgtttgattcccctaagcctccttcagagcgtgcaactctaacccttcctgcggttcactccgcaaagcgcgtgtggttgctggtttctggtgcggagaaggctgaggcagctgcggcgatcgtcaacggtgagcctgctgttgagtggcctgctgctggagctaccggatctgaggaaacggtattgttcttggctgatgatgctgcaggaaatctc

SEQ ID NO: 60 - protein, 275 aa, Corynebacterium glutamicum
MSPTACLRSFATWIQIWATSTHYPACPASSWKPSKEKYNTMVDVVRARDTEDLVAQAASKFIEVVEAATANNGTAQVVLTGGGAGIKLLEKLSVDAADLAWDRIHVFFGDERNVPVSDSESNEGQAREALLSKVSIPEANIHGYGLGDVDLAEAARAYEAVLDEFAPNGFDLHLLGMGGEGHINSLFPHTDAVKESSAKVIAVFDSPKPPSERATLTLPAVHSAKRVWLLVSGAEKAEAAAAIVNGEPAVEWPAAGATGSEETVLFLADDAAGNL

SEQ ID NO: 61 - DNA, 705 bp, Corynebacterium glutamicum
  CDS (1)..(705): RXA02735W
atggttgatgtagtacgcgcacgcgatactgaagatttggttgcacaggctgcctccaaattcattgaggttgttgaagcagcaactgccaataatggcaccgcacaggtagtgctcaccggtggtggcgccggcatcaagttgctggaaaagctcagcgttgatgcggctgaccttgcctgggatcgcattcatgtgttcttcggcgatgagcgcaatgtccctgtcagtgattctgagtccaatgagggccaggctcgtgaggcactgttgtccaaggtttctatccctgaagccaacattcacggatatggtctcggcgacgtagatcttgcagaggcagcccgcgcttacgaagctgtgttggatgaattcgcaccaaacggctttgatcttcacctgctcggcatgggtggcgaaggccatatcaactccctgttccctcacaccgatgcagtcaaggaatcctccgcaaaggtcatcgcggtgtttgattcccctaagcctccttcagagcgtgcaactctaacccttcctgcggttcactccgcaaagcgcgtgtggttgctggtttctggtgcggagaaggctgaggcagctgcggcgatcgtcaacggtgagcctgctgttgagtggcctgctgctggagctaccggatctgaggaaacggtattgttcttggctgatgatgctgcaggaaatctc

SEQ ID NO: 62 - protein, 235 aa, Corynebacterium glutamicum
MVDVVRARDTEDLVAQAASKFIEVVEAATANNGTAQVVLTGGGAGIKLLEKLSVDAADLAWDRIHVFFGDERNVPVSDSESNEGQAREALLSKVSIPEANIHGYGLGDVDLAEAARAYEAVLDEFAPNGFDLHLLGMGGEGHINSLFPHTDAVKESSAKVIAVFDSPKPPSERATLTLPAVHSAKRVWLLVSGAEKAEAAAAIVNGEPAVEWPAAGATGSEETVLFLADDAAGNL

SEQ ID NO: 63 - DNA, 957 bp, Corynebacterium glutamicum
  CDS (1)..(957): RXA02736W
atgatctttgaacttccggataccaccacccagcaaatttccaagaccctaactcgactgcgtgaatcgggcacccaggtcaccaccggccgagtgctcaccctcatcgtggtcactgactccgaaagcgatgtcgctgcagttaccgagtccaccaatgaagcctcgcgcgagcacccatctcgcgtgatcattttggtggttggcgataaaactgcagaaaacaaagttgacgcagaagtccgtatcggtggcgacgctggtgcttccgagatgatcatcatgcatctcaacggacctgtcgctgacaagctccagtatgtcgtcacaccactgttgcttcctgacacccccatcgttgcttggtggccaggtgaatcaccaaagaatccttcccaggacccaattggacgcatcgcacaacgacgcatcactgatgctttgtacgaccgtgatgacgcactagaagatcgtgttgagaactatcacccaggtgataccgacatgacgtgggcgcgccttacccagtggcggggacttgttgcctcctcattggatcacccaccacacagcgaaatcacttccgtgaggctgaccggtgcaagcggcagtacctcggtggatttggctgcaggctggttggcgcggaggctgaaagtgcctgtgatccgcgaggtgacagatgctcccaccgtgccaaccgatgagtttggtactccactgctggctatccagcgcctggagatcgttcgcaccaccggctcgatcatcatcaccatctatgacgctcatacccttcaggtagagatgccggaatccggcaatgccccatcgctggtggctattggtcgtcgaagtgagtccgactgcttgtctgaggagcttcgccacatggatccagatttgggctaccagcacgcactatccggcttgtccagcgtcaagctggaaaccgtc

SEQ ID NO: 64 - protein, 319 aa, Corynebacterium glutamicum
MIFELPDTTTQQISKTLTRLRESGTQVTTGRVLTLIVVTDSESDVAAVTESTNEASREHPSRVIILVVGDKTAENKVDAEVRIGGDAGASEMIIMHLNGPVADKLQYVVTPLLLPDTPIVAWWPGESPKNPSQDPIGRIAQRRITDALYDRDDALEDRVENYHPGDTDMTWARLTQWRGLVASSLDHPPHSEITSVRLTGASGSTSVDLAAGWLARRLKVPVIREVTDAPTVPTDEFGTPLLAIQRLEIVRTTGSIIITIYDAHTLQVEMPESGNAPSLVAIGRRSESDCLSEELRHMDPDLGYQHALSGLSSVKLETV

SEQ ID NO: 65 - DNA, 1542 bp, Corynebacterium glutamicum
  CDS (1)..(1542): RXA02737W
gtgagcacaaacacgaccccctccagctggacaaacccactgcgcgacccgcaggataaacgactcccccgcatcgctggcccttccggcatggtgatcttcggtgtcactggcgacttggctcgaaagaagctgctccccgccatttatgatctagcaaaccgcggattgctgcccccaggattctcgttggtaggttacggccgccgcgaatggtccaaagaagactttgaaaaatacgtacgcgatgccgcaagtgctggtgctcgtacggaattccgtgaaaatgtttgggagcgcctcgccgagggtatggaatttgttcgcggcaactttgatgatgatgcagctttcgacaacctcgctgcaacactcaagcgcatcgacaaaacccgcggcaccgccggcaactgggcttactacctgtccattccaccagattccttcacagcggtctgccaccagctggagcgttccggcatggctgaatccaccgaagaagcatggcgccgcgtgatcatcgagaagcctttcggccacaacctcgaatccgcacacgagctcaaccagctggtcaacgcagtcttcccagaatcttctgtgttccgcatcgaccactatttgggcaaggaaacagttcaaaacatcctggctctgcgttttgctaaccagctgtttgagccactgtggaactccaactacgttgaccacgtccagatcaccatggctgaagatattggcttgggtggacgtgctggttactacgacggcatcggcgcagcccgcgacgtcatccagaaccacctgatccagctcttggctctggttgccatggaagaaccaatttctttcgtgccagcgcagctgcaggcagaaaagatcaaggtgctctctgcgacaaagccgtgctacccattggataaaacctccgctcgtggtcagtacgctgccggttggcagggctctgagttagtcaagggacttcgcgaagaagatggcttcaaccctgagtccaccactgagacttttgcggcttgtaccttagagatcacgtctcgtcgctgggctggtgtgccgttctacctgcgcaccggtaagcgtcttggtcgccgtgttactgagattgccgtggtgtttaaagacgcaccacaccagcctttcgacggcgacatgactgtatcccttggccaaaacgccatcgtgattcgcgtgcagcctgatgaaggtgtgctcatccgcttcggttccaaggttccaggttctgccatggaagtccgtgacgtcaacatggacttctcctactcagaatccttcactgaagaatcacctgaagcatacgagcgcctcattttggatgcgctgttagatgaatccagcctcttccctaccaacgaggaagtggaactgagctggaagattctggatccaattcttgaagcatgggatgccgatggagaaccagaggattacccagcgggtacgtggggtccaaagagcgctgatgaaatgctttcccgcaacggtcacacctggcgcaggcca

SEQ ID NO: 66 - protein, 514 aa, Corynebacterium glutamicum
MSTNTTPSSWTNPLRDPQDKRLPRIAGPSGMVIFGVTGDLARKKLLPAIYDLANRGLLPPGFSLVGYGRREWSKEDFEKYVRDAASAGARTEFRENVWERLAEGMEFVRGNFDDDAAFDNLAATLKRIDKTRGTAGNWAYYLSIPPDSFTAVCHQLERSGMAESTEEAWRRVIIEKPFGHNLESAHELNQLVNAVFPESSVFRIDHYLGKETVQNILALRFANQLFEPLWNSNYVDHVQITMAEDIGLGGRAGYYDGIGAARDVIQNHLIQLLALVAMEEPISFVPAQLQAEKIKVLSATKPCYPLDKTSARGQYAAGWQGSELVKGLREEDGFNPESTTETFAACTLEITSRRWAGVPFYLRTGKRLGRRVTEIAVVFKDAPHQPFDGDMTVSLGQNAIVIRVQPDEGVLIRFGSKVPGSAMEVRDVNMDFSYSESFTEESPEAYERLILDALLDESSLFPTNEEVELSWKILDPILEAWDADGEPEDYPAGTWGPKSADEMLSRNGHTWRRP

SEQ ID NO: 67 - DNA, 1080 bp, Corynebacterium glutamicum
  CDS (1)..(1080): RXA02738W
atgtctcacattgatgatcttgcacagctcggcacttccacttggctcgacgacctctcccgcgagcgcattacttccggcaatctcagccaggttattgaggaaaagtctgtagtcggtgtcaccaccaacccagctattttcgcagcagcaatgtccaagggcgattcctacgacgctcagatcgcagagctcaaggccgctggcgcatctgttgaccaggctgtttacgccatgagcatcgacgacgttcgcaatgcttgtgatctgttcaccggcatcttcgagtcctccaacggctacgacggccgcgtgtccatcgaggttgacccacgtatctctgctgaccgcgacgcaaccctggctcaggccaaggagctgtgggcaaaggttgatcgtccaaacgtcatgatcaagatccctgcaaccccaggttctttgccagcaatcaccgacgctttggctgagggcatcagcgttaacgtcaccttgatcttctccgttgctcgctaccgcgaggtcatcgctgcgttcatcgagggcatcaagcaggctgctgcaaacggccacgacgtctccaagatccactctgtggcttccttcttcgtctcccgcgtcgacgttgagatcgacaagcgcctcgaggcaatcggatccgatgaggctttggctctgcgcggcaaggcaggcgttgccaacgctcagcgcgcttacgctgtgtacaaggagcttttcgacgccgccgagctgcctgaaggtgccaacactcagcgcccactgtgggcatccaccggcgtgaagaaccctgcgtacgctgcaactctttacgtttccgagctggctggtccaaacaccgtcaacaccatgccagaaggcaccatcgacgcggttctggagcagggcaacctgcacggtgacaccctgtccaactccgcggcagaagctgacgctgtgttctcccagcttgaggctctgggcgttgacttggcagatgtcttccaggtcctggagaccgagggtgtggacaagttcgttgcttcttggagcgaactgcttgagtccatggaagctcgcctgaag

SEQ ID NO: 68 - protein, 360 aa, Corynebacterium glutamicum
MSHIDDLAQLGTSTWLDDLSRERITSGNLSQVIEEKSVVGVTTNPAIFAAAMSKGDSYDAQIAELKAAGASVDQAVYAMSIDDVRNACDLFTGIFESSNGYDGRVSIEVDPRISADRDATLAQAKELWAKVDRPNVMIKIPATPGSLPAITDALAEGISVNVTLIFSVARYREVIAAFIEGIKQAAANGHDVSKIHSVASFFVSRVDVEIDKRLEAIGSDEALALRGKAGVANAQRAYAVYKELFDAAELPEGANTQRPLWASTGVKNPAYAATLYVSELAGPNTVNTMPEGTIDAVLEQGNLHGDTLSNSAAEADAVFSQLEALGVDLADVFQVLETEGVDKFVASWSELLESMEARLK

SEQ ID NO: 69 - DNA, 2100 bp, Corynebacterium glutamicum
  CDS (1)..(2100): RXA02739K
ttgaccaccttgacgctgtcacctgaacttcaggcgctcactgtacgcaattacccctctgattggtccgatgtggacaccaaggctgtagacactgttcgtgtcctcgctgcagacgctgtagaaaactgtggctccggccacccaggcaccgcaatgagcctggctccccttgcatacaccttgtaccagcgggttatgaacgtagatccacaggacaccaactgggcaggccgtgaccgcttcgttctttcttgtggccactcctctttgacccagtacatccagctttacttgggtggattcggccttgagatggatgacctgaaggctctgcgcacctgggattccttgaccccaggacaccctgagtaccgccacaccaagggcgttgagatcaccactggccctcttggccagggtcttgcatctgcagttggtatggccatggctgctcgtcgtgagcgtggcctattcgacccaaccgctgctgagggcgaatccccattcgaccaccacatctacgtcattgcttctgatggtgacctgcaggaaggtgtcacctctgaggcatcctccatcgctggcacccagcagctgggcaacctcatcgtgttctgggatgacaaccgcatctccatcgaagacaacactgagatcgctttcaacgaggacgttgttgctcgttacaaggcttacggctggcagaccattgaggttgaggctggcgaggacgttgcagcaatcgaagctgcagtggctgaggctaagaaggacaccaagcgacctaccttcatccgcgttcgcaccatcatcggcttcccagctccaactatgatgaacaccggtgctgtgcacggtgctgctcttggcgcagctgaggttgcagcaaccaagactgagcttggattcgatcctgaggctcacttcgcgatcgacgatgaggttatcgctcacacccgctccctcgcagagcgcgctgcacagaagaaggctgcatggcaggtcaagttcgatgagtgggcagctgccaaccctgagaacaaggctctgttcgatcgcctgaactcccgtgagcttccagcgggctacgctgacgagctcccaacatgggatgcagatgagaagggcgtcgcaactcgtaaggcttccgaggctgcacttcaggcactgggcaagacccttcctgagctgtggggcggttccgctgacctcgcaggttccaacaacaccgtgatcaagggctccccttccttcggccctgagtccatctccaccgagacctggtctgctgagccttacggccgtaacctgcacttcggtatccgtgagcacgctatgggatccatcctcaacggcatttccctccacggtggcacccgcccatacggcggaaccttcctcatcttctccgactacatgcgtcctgcagttcgtcttgcagctctcatggagaccgacgcttactacgtctggacccacgactccatcggtctgggcgaagatggcccaacccaccagcctgttgaaaccttggctgcactgcgcgccatcccaggtctgtccgtcctgcgtcctgcagatgcgaacgagaccgcccaggcttgggctgcagcacttgagtacaaggaaggccctaagggtcttgcactgacccgccagaacgttcctgttctggaaggcaccaaggagaaggctgctgaaggcgttcgccgcggtggctacgtcctggttgagggttccaaggaaaccccagatgtgatcctcatgggctccggctccgaggttcagcttgcagttaacgctgcgaaggctctggaagctgagggcgttgcagctcgcgttgtttccgttccttgcatggattggttccaggagcaggacgcagagtacatcgagtccgttctgcctgcagctgtgaccgctcgtgtgtctgttgaagctggcatcgcaatgccttggtaccgcttcttgggcacccagggccgtgctgtctcccttgagcacttcggtgcttctgcggattaccagaccctgtttgagaagttcggcatcaccaccgatgcagtcgtggcagcggccaaggactccattaacggt

SEQ ID NO: 70 - protein, 700 aa, Corynebacterium glutamicum
MTTLTLSPELQALTVRNYPSDWSDVDTKAVDTVRVLAADAVENCGSGHPGTAMSLAPLAYTLYQRVMNVDPQDTNWAGRDRFVLSCGHSSLTQYIQLYLGGFGLEMDDLKALRTWDSLTPGHPEYRHTKGVEITTGPLGQGLASAVGMAMAARRERGLFDPTAAEGESPFDHHIYVIASDGDLQEGVTSEASSIAGTQQLGNLIVFWDDNRISIEDNTEIAFNEDVVARYKAYGWQTIEVEAGEDVAAIEAAVAEAKKDTKRPTFIRVRTIIGFPAPTMMNTGAVHGAALGAAEVAATKTELGFDPEAHFAIDDEVIAHTRSLAERAAQKKAAWQVKFDEWAAANPENKALFDRLNSRELPAGYADELPTWDADEKGVATRKASEAALQALGKTLPELWGGSADLAGSNNTVIKGSPSFGPESISTETWSAEPYGRNLHFGIREHAMGSILNGISLHGGTRPYGGTFLIFSDYMRPAVRLAALMETDAYYVWTHDSIGLGEDGPTHQPVETLAALRAIPGLSVLRPADANETAQAWAAALEYKEGPKGLALTRQNVPVLEGTKEKAAEGVRRGGYVLVEGSKETPDVILMGSGSEVQLAVNAAKALEAEGVAARVVSVPCMDWFQEQDAEYIESVLPAAVTARVSVEAGIAMPWYRFLGTQGRAVSLEHFGASADYQTLFEKFGITTDAVVAAAKDSING

SEQ ID NO: 71 - DNA, 705 bp, Corynebacterium glutamicum
  CDS (1)..(705): RXA02910K
gtggagattcgttggttggaaggctttatcgcggtcgcggaagaattgcactttagtaatgctgcgattcgtttggggatgccgcaatcgccgttgagtcagttgatccggcggttggagtcggagttggggcagaagctttttgatcgcagtacccggtcggtggagttaactgccgcgggtcgggcgtttttgccacatgccagggggattgtggcgagcgctgcggtggcgagggaagctgtgaatgctgccgagggggagatcgttggtgttgttcgcattggtttttctggtgtgctgaactattccacgctgccgcttttgaccagtgaggtgcataaacggcttcctaatgtggagttggagctcgttggtcagaagttgacgagggaagcggtaagtttgctgcgcttgggggcgttggatattacgttgatgggtttgcccattgaggatccagagattgagactcggctgattagtttggaagagttttgcgtggtgttgccgaaggatcatcgtcttgcgggggaaggagtggtggatttggtggatctggctaaagatgggtttgtgacgacgccggagtttgcggggtctgtgtttaggaattccacctttcagttgtgtgctgaggctggttttgtgccgaggatcagccagcaagttaatgatccttacatggcgctgttgttggcgcgg

SEQ ID NO: 72 - protein, 235 aa, Corynebacterium glutamicum
MEIRWLEGFIAVAEELHFSNAAIRLGMPQSPLSQLIRRLESELGQKLFDRSTRSVELTAAGRAFLPHARGIVASAAVAREAVNAAEGEIVGVVRIGFSGVLNYSTLPLLTSEVHKRLPNVELELVGQKLTREAVSLLRLGALDITLMGLPIEDPEIETRLISLEEFCVVLPKDHRLAGEGVVDLVDLAKDGFVTTPEFAGSVFRNSTFQLCAEAGFVPRISQQVNDPYMALLLAR

SEQ ID NO: 73 - DNA, 849 bp, Corynebacterium glutamicum
  CDS (1)..(846): RXA02910E
atggcatttccgcttctagcggttgctggcacagttgcccccgttgcagcaggatgggcaaaagataagtttctcagcaactctcagaataatcagcaggcccagaatcagcagatgagttttggacaggtcaacaacagcgcacagaattctggatcagaaaacagcggtttcatgggtcaatacggcaatctgggtgcaggtttggcaggtgctgctacaggcgcagggcttgcgtatagcgattttgaagatggtcaaagtttgtcctcgaaggcccgcaacatggtcggcaaagggctcgctggtgccggagctggtgtgttcaccaagcttgccaatgatgcaattcaggccgagggtggctcgatgaaggctagtgcttattctgccattgcaggcggcttgggatcgtatctcaaagacggcggtccgggtgtgattaaatccgcgatggccagcggtgcagccggttttggtgcggataaagtgcacgataaattagctgagtctggtcatgaggggttggctgattccttgtcgggcgctattcaaggaggtggtcttggttactccacgcttggcggtgtcactggtgctggtattggcggtgcgacgggcggtctcgcaggactagcacaaaactactttggtggtggcgatgactacagcaacgctggggcatctgcatcggggtttagtgccaaccaggttaatagtgagatcagcaccgagattccgcagtttgcgaatcttggtcaaccacagcgatccgagcttgaacaattagcgctacctcaagaatcacggtctgtagataagagctacgaccaaggctacgaagcgtaa

SEQ ID NO: 74 - protein, 282 aa, Corynebacterium glutamicum
MAFPLLAVAGTVAPVAAGWAKDKFLSNSQNNQQAQNQQMSFGQVNNSAQNSGSENSGFMGQYGNLGAGLAGAATGAGLAYSDFEDGQSLSSKARNMVGKGLAGAGAGVFTKLANDAIQAEGGSMKASAYSAIAGGLGSYLKDGGPGVIKSAMASGAAGFGADKVHDKLAESGHEGLADSLSGAIQGGGLGYSTLGGVTGAGIGGATGGLAGLAQNYFGGGDDYSNAGASASGFSANQVNSEISTEIPQFANLGQPQRSELEQLALPQESRSVDKSYDQGYEA

SEQ ID NO: 75 - DNA, 1407 bp, Corynebacterium glutamicum
  CDS (1)..(1407): RXA03083W
  unsure 903 .. 903: All occurrences of n indicate any nucleotide
atggcaaagaggatcgtaattatcggcggtggacctgcaggctatgaagccgcactcgcaggcgctaaatacggtgcagaagttaccgttattgaagatgtcggagttggcggatccgcagtcaccatggactgtgtaccttcaaagtccttcatcgctggtaccggtatcaaaaccgacctccgacgtgctgatgacatgggacttaaccgtgggcttggaaaagcacacctagaaatcgatgcactgaacatccgtgtgaaggaccttgcgaaagcacagtccgaagatatcttgggccagctgcagcgctcagatgtccgcatgattaacggtgtgggccgctttgatgattacaacaccaagcaaaccacccactacattaaagtcacccacagcgatggctccgaagaaaccgttgagtgcgatctggtgctggttgcaactggtgcaaccccccgcattcttaaaggtgcagagccagacggcgagcgcatcttgacctggcgtcaggtctacgacattgaagaactccccacccaccttatcgtggttggttccggtgtgaccggtgcggaatttgtctctgcgtttgctgaactcggcgtcaaagtcaccatggtggcatcccgtgaccgcattttgcctcacgatgacgcagatgccgcagacgtgctggaaaccgttctggctgagcgcggagtatccctggaaaagcatgcccgcgtggagtctgtcacccgcaccgaagacggtggcgtgtgtgttcgcactgctgacggacgagaaatctacggttctcacgcgttgatgactgttggttccattccaaacacggcagatcttggcctggagaacatcggtgttgagctggcaccatccggccatatcaaggttgaccgngtctcccgcaccaacatccccggtgtgtacgcagcaggtgactgtactgacctattcccactggcgtccgttgcagcgatgcagggccgtatcgccatgtatcacgcactcggtgaaggcgtgagccccatccgtttgaagactgttgccaccgcagtgtttacccgcccagagatcgcagcagtaggtatcacccatgcacaagttgattccggcgaagtgtctgctcgcgtgattgtgcttcctttggctactaacccacgcgccaagatgcgttccctgcgccacggttttgtgaagctgttctgccgccgtaactctggcctgatcatcggtggtgtcgtggtggcaccgaccgcgtctgagctgatcctaccgatcgctgtggcagtgaccaaccgtctgacagttgctgatctggctgataccttcgcggtgtacccatcattgtcaggttcgattactgaagcagcacgtcagctggttcaacatgatgatctaggc

SEQ ID NO: 76 - protein, 469 aa, Corynebacterium glutamicum
MAKRIVIIGGGPAGYEAALAGAKYGAEVTVIEDVGVGGSAVTMDCVPSKSFIAGTGIKTDLRRADDMGLNRGLGKAHLEIDALNIRVKDLAKAQSEDILGQLQRSDVRMINGVGRFDDYNTKQTTHYIKVTHSDGSEETVECDLVLVATGATPRILKGAEPDGERILTWRQVYDIEELPTHLIVVGSGVTGAEFVSAFAELGVKVTMVASRDRILPHDDADAADVLETVLAERGVSLEKHARVESVTRTEDGGVCVRTADGREIYGSHALMTVGSIPNTADLGLENIGVELAPSGHIKVDRVSRTNIPGVYAAGDCTDLFPLASVAAMQGRIAMYHALGEGVSPIRLKTVATAVFTRPEIAAVGITHAQVDSGEVSARVIVLPLATNPRAKMRSLRHGFVKLFCRRNSGLIIGGVVVAPTASELILPIAVAVTNRLTVADLADTFAVYPSLSGSITEAARQLVQHDDLG

SEQ ID NO: 77 - DNA, 792 bp, Corynebacterium glutamicum
  CDS (1)..(792): RXA03802K
atggtcagccaaacggaaagacagcatgcaattgcttctttactggcaccaactggtgcggtgtctgtaggagatttagccgagcatttccatgtgacaaccgaaacagtgcgacgtgatcttcggatcatggagtcactgggtttgttgcaacgagttcacggtggcgccattagcccagagcccatgggtacgtctccccctcggctgaaacctgccttgggtaaaggaatgccaccggaaccccgtgttttagaacttgcagaaactgcagtttccctcatcacacctctagcacgcagcattttcctggattcaggtttagcgtgcacggcgattgccacggtgttgggggatcctccagaagatgccaggtggactgttgttacaagttcccccggcgctgtgattgccttgtccgcgacagatgccacctccacggtggtgctgcacgggcaggttcacggtaattgttcttcaatcattgggtccacggcagtagacatgatttcgcagttgcgcgctgatatcgccttcgtggaggttgatgcgattcaatccgatacaagtctgtgcacgtttttcccggagacgattcccatcaagcaagccatgatcaaaaacgcggctttcacagttgctgttctcagcccgagatctccccaagatcaagaacttcaacttttgaagcaccctttttccaccttggctgattttgatgcccttgttaccgatgaccacacgctagattttccagttttgcccgaccacaactttcaggtggtaacccca

SEQ ID NO: 78 - protein, 264 aa, Corynebacterium glutamicum
MVSQTERQHAIASLLAPTGAVSVGDLAEHFHVTTETVRRDLRIMESLGLLQRVHGGAISPEPMGTSPPRLKPALGKGMPPEPRVLELAETAVSLITPLARSIFLDSGLACTAIATVLGDPPEDARWTVVTSSPGAVIALSATDATSTVVLHGQVHGNCSSIIGSTAVDMISQLRADIAFVEVDAIQSDTSLCTFFPETIPIKQAMIKNAAFTVAVLSPRSPQDQELQLLKHPFSTLADFDALVTDDHTLDFPVLPDHNFQVVTP

SEQ ID NO: 79 - DNA, 3420 bp, Corynebacterium glutamicum
  CDS (1)..(3420): RXA04031K
gtgtcgactcacacatcttcaacgcttccagcattcaaaaagatcttggtagcaaaccgcggcgaaatcgcggtccgtgctttccgtgcagcactcgaaaccggtgcagccacggtagctatttacccccgtgaagatcggggatcattccaccgctcttttgcttctgaagctgtccgcattggtaccgaaggctcaccagtcaaggcgtacctggacatcgatgaaattatcggtgcagctaaaaaagttaaagcagatgccatttacccgggatacggcttcctgtctgaaaatgcccagcttgcccgcgagtgtgcggaaaacggcattacttttattggcccaaccccagaggttcttgatctcaccggtgataagtctcgcgcggtaaccgccgcgaagaaggctggtctgccagttttggcggaatccaccccgagcaaaaacatcgatgagatcgttaaaagcgctgaaggccagacttaccccatctttgtgaaggcagttgccggtggtggcggacgcggtatgcgttttgttgcttcacctgatgagcttcgcaaattagcaacagaagcatctcgtgaagctgaagcggctttcggcgatggcgcggtatatgtcgaacgtgctgtgattaaccctcagcatattgaagtgcagatccttggcgatcacactggagaagttgtacacctttatgaacgtgactgctcactgcagcgtcgtcaccaaaaagttgtcgaaattgcgccagcacagcatttggatccagaactgcgtgatcgcatttgtgcggatgcagtaaagttctgccgctccattggttaccagggcgcgggaaccgtggaattcttggtcgatgaaaagggcaaccacgtcttcatcgaaatgaacccacgtatccaggttgagcacaccgtgactgaagaagtcaccgaggtggacctggtgaaggcgcagatgcgcttggctgctggtgcaaccttgaaggaattgggtctgacccaagataagatcaagacccacggtgcagcactgcagtgccgcatcaccacggaagatccaaacaacggcttccgcccagataccggaactatcaccgcgtaccgctcaccaggcggagctggcgttcgtcttgacggtgcagctcagctcggtggcgaaatcaccgcacactttgactccatgctggtgaaaatgacctgccgtggttccgactttgaaactgctgttgctcgtgcacagcgcgcgttggctgagttcaccgtgtctggtgttgcaaccaacattggtttcttgcgtgcgttgctgcgggaagaggacttcacttccaagcgcatcgccaccggattcattgccgatcacccgcacctccttcaggctccacctgctgatgatgagcagggacgcatcctggattacttggcagatgtcaccgtgaacaagcctcatggtgtgcgtccaaaggatgttgcagctcctatcgataagctgcctaacatcaaggatctgccactgccacgcggttcccgtgaccgcctgaagcagcttggcccagccgcgtttgctcgtgatctccgtgagcaggacgcactggcagttactgataccaccttccgcgatgcacaccagtctttgcttgcgacccgagtccgctcattcgcactgaagcctgcggcagaggccgtcgcaaagctgactcctgagcttttgtccgtggaggcctggggcggcgcgacctacgatgtggcgatgcgtttcctctttgaggatccgtgggacaggctcgacgagctgcgcgaggcgatgccgaatgtaaacattcagatgctgcttcgcggccgcaacaccgtgggatacaccccgtacccagactccgtctgccgcgcgtttgttaaggaagctgccagctccggcgtggacatcttccgcatcttcgacgcgcttaacgacgtctcccagatgcgtccagcaatcgacgcagtcctggagaccaacaccgcggtagccgaggtggctatggcttattctggtgatctctctgatccaaatgaaaagctctacaccctggattactacctaaagatggcagaggagatcgtcaagtctggcgctcacatcttggccattaaggatatggctggtctgcttcgcccagctgcggtaaccaagctggtcaccgcactgcgccgtgaattcgatctgccagtgcacgtgcacacccacgacactgcgggtggccagctggcaacctactttgctgcagctcaagctggtgcagatgctgttgacggtgcttccgcaccactgtctggcaccacctcccagccatccctgtctgccattgttgctgcattcgcgcacacccgtcgcgataccggtttgagcctcgaggctgtttctgacctcgagccgtactgggaagcagtgcgcggactgtacctgccatttgagtctggaaccccaggcccaaccggtcgcgtctaccgccacgaaatcccaggcggacagttgtccaacctgcgtgcacaggccaccgcactgggccttgcggatcgtttcgaactcatcgaagacaactacgcagccgttaatgagatgctgggacgcccaaccaaggtcaccccatcctccaaggttgttggcgacctcgcactccacctcgttggtgcgggtgtggatccagcagactttgctgccgatccacaaaagtacgacatcccagactctgtcatcgcgttcctgcgcggcgagcttggtaaccctccaggtggctggccagagccactgcgcacccgcgcactggaaggccgctccgaaggcaaggcacctctgacggaagttcctgaggaagagcaggcgcacctcgacgctgatgattccaaggaacgtcgcaatagcctcaaccgcctgctgttcccgaagccaaccgaagagttcctcgagcaccgtcgccgcttcggcaacacctctgcgctggatgatcgtgaattcttctacggcctggtcgaaggccgcgagactttgatccgcctgccagatgtgcgcaccccactgcttgttcgcctggatgcgatctctgagccagacgataagggtatgcgcaatgttgtggccaacgtcaacggccagatccgcccaatgcgtgtgcgtgaccgctccgttgagtctgtcaccgcaaccgcagaaaaggcagattcctccaacaagggccatgttgctgcaccattcgctggtgttgtcaccgtgactgttgctgaaggtgatgaggtcaaggctggagatgcagtcgcaatcatcgaggctatgaagatggaagcaacaatcactgcttctgttgacggcaaaatcgatcgcgttgtggttcctgctgcaacgaaggtggaaggtggcgacttgatcgtcgtcgtttcc

SEQ ID NO: 80 - protein, 1140 aa, Corynebacterium glutamicum
MSTHTSSTLPAFKKILVANRGEIAVRAFRAALETGAATVAIYPREDRGSFHRSFASEAVRIGTEGSPVKAYLDIDEIIGAAKKVKADAIYPGYGFLSENAQLARECAENGITFIGPTPEVLDLTGDKSRAVTAAKKAGLPVLAESTPSKNIDEIVKSAEGQTYPIFVKAVAGGGGRGMRFVASPDELRKLATEASREAEAAFGDGAVYVERAVINPQHIEVQILGDHTGEVVHLYERDCSLQRRHQKVVEIAPAQHLDPELRDRICADAVKFCRSIGYQGAGTVEFLVDEKGNHVFIEMNPRIQVEHTVTEEVTEVDLVKAQMRLAAGATLKELGLTQDKIKTHGAALQCRITTEDPNNGFRPDTGTITAYRSPGGAGVRLDGAAQLGGEITAHFDSMLVKMTCRGSDFETAVARAQRALAEFTVSGVATNIGFLRALLREEDFTSKRIATGFIADHPHLLQAPPADDEQGRILDYLADVTVNKPHGVRPKDVAAPIDKLPNIKDLPLPRGSRDRLKQLGPAAFARDLREQDALAVTDTTFRDAHQSLLATRVRSFALKPAAEAVAKLTPELLSVEAWGGATYDVAMRFLFEDPWDRLDELREAMPNVNIQMLLRGRNTVGYTPYPDSVCRAFVKEAASSGVDIFRIFDALNDVSQMRPAIDAVLETNTAVAEVAMAYSGDLSDPNEKLYTLDYYLKMAEEIVKSGAHILAIKDMAGLLRPAAVTKLVTALRREFDLPVHVHTHDTAGGQLATYFAAAQAGADAVDGASAPLSGTTSQPSLSAIVAAFAHTRRDTGLSLEAVSDLEPYWEAVRGLYLPFESGTPGPTGRVYRHEIPGGQLSNLRAQATALGLADRFELIEDNYAAVNEMLGRPTKVTPSSKVVGDLALHLVGAGVDPADFAADPQKYDIPDSVIAFLRGELGNPPGGWPEPLRTRALEGRSEGKAPLTEVPEEEQAHLDADDSKERRNSLNRLLFPKPTEEFLEHRRRFGNTSALDDREFFYGLVEGRETLIRLPDVRTPLLVRLDAISEPDDKGMRNVVANVNGQIRPMRVRDRSVESVTATAEKADSSNKGHVAAPFAGVVTVTVAEGDEVKAGDAVAIIEAMKMEATITASVDGKIDRVVVPAATKVEGGDLIVVVS

SEQ ID NO: 81 - DNA, 366 bp, Corynebacterium glutamicum
  CDS (1)..(366): RXA04073K
gtgtttggcgatgtgatcagactaagtgatcaccgtcaccagcaaaaggggtttgcgaactttactaagtcattacccccgcctaaccccgacttttatctaggtcacaccttcgaaacctacggaacgttgcggtgcctgcattttcccatttcagagcatttgcccagtacatccgtactagcaactcccccgcccactttttctgcgaagccagaactttgcaaacttcacaacaggggtgaccacccccgcacaaaacttaaaaacccaaaccgattgacgcaccaatgcccgatggagcaatgtgtgaaccacgccaccacgcaaaccgatgcacatcacgtcgaaacagtgacagtgcat

SEQ ID NO: 82 - protein, 122 aa, Corynebacterium glutamicum
MFGDVIRLSDHRHQQKGFANFTKSLPPPNPDFYLGHTFETYGTLRCLHFPISEHLPSTSVLATPPPTFSAKPELCKLHNRGDHPRTKLKNPNRLTHQCPMEQCVNHATTQTDAHHVETVTVH

SEQ ID NO: 83 - DNA, 2829 bp, Corynebacterium glutamicum
  CDS (1)..(2829): RXA04174K
ttggagctcactgtgactgaaagcaagaactccttcaatgctaagagcacccttgaagttggcgacaagtcctatgactacttcgccctctctgcagtgcctggcatggagaagctgccgtactccctcaaggttctcggagagaaccttcttcgtaccgaagacggcgcaaacatcaccaacgagcacattgaggctatcgccaactgggatgcatcttccgatccaagcatcgaaatccagttcaccccagcccgtgttctcatgcaggacttcaccggtgtcccttgtgtagttgacctcgcaaccatgcgtgaggcagttgctgcactcggtggcgaccctaacgacgtcaacccactgaacccagccgagatggtcattgaccactccgtcatcgtggaggctttcggccgcccagatgcactggctaagaacgttgagatcgagtacgagcgcaacgaggagcgttaccagttcctgcgttggggttccgagtccttctccaacttccgcgttgttcctccaggaaccggtatcgtccaccaggtcaacattgagtacttggctcgcgtcgtcttcgacaacgagggccttgcatacccagatacctgcatcggtaccgactcccacaccaccatggaaaacggcctgggcatcctgggctggggcgttggtggcattgaggctgaagcagcaatgctcggccagccagtgtccatgctgatccctcgcgttgttggcttcaagttgaccggcgagatcccagtaggcgttaccgcaactgacgttgtgctgaccatcaccgaaatgctgcgcgaccacggcgtcgtccagaagttcgttgagttctacggctccggtgttaaggctgttccactggctaaccgtgcaaccatcggcaacatgtccccagagttcggctccacctgtgcgatgttcccaatcgacgaggagaccaccaagtacctgcgcctcaccggccgcccagaagagcaggttgcactggtcgaggcttacgccaaggcgcagggcatgtggctcgacgaggacaccgttgaagctgagtactccgagtacctcgagctggacctgtccaccgttgttccttccatcgctggccctaagcgcccacaggaccgcatccttctctccgaggcaaaggagcagttccgtaaggatctgccaacctacaccgacgacgctgtttccgtagacacctccatccctgcaacccgcatggttaacgaaggtggcggacagcctgaaggcggcgtcgaagctgacaactacaacgcttcctgggctggctccggcgagtccttggctactggcgcagaaggacgtccttccaagccagtcaccgttgcatccccacagggtggcgagtacaccatcgaccacggcatggttgcaattgcatccatcacctcttgcaccaacacctctaacccatccgtgatgatcggcgctggcctgatcgcacgtaaggcagcagaaaagggcctcaagtccaagccttgggttaagaccatctgtgcaccaggttcccaggttgtcgacggctactaccagcgcgcagacctctggaaggaccttgaggccatgggcttctacctctccggcttcggctgcaccacctgtattggtaactccggcccactgccagaggaaatctccgctgcgatcaacgagcacgacctgaccgcaaccgcagttttgtccggtaaccgtaacttcgagggacgtatctcccctgacgttaagatgaactacctggcatccccaatcatggtcattgcttacgcaatcgctggcaccatggacttcgacttcgagaacgaagctcttggacaggaccaggacggcaacgacgtcttcctgaaggacatctggccttccaccgaggaaatcgaagacaccatccagcaggcaatctcccgtgagctttacgaagctgactacgcagatgtcttcaagggtgacaagcagtggcaggaactcgatgttcctaccggtgacaccttcgagtgggacgagaactccacctacatccgcaaggcaccttacttcgacggcatgcctgtcgagccagtggcagtcaccgacatccagggcgcacgcgttctggctaagctcggcgactctgtcaccaccgaccacatctcccctgcttcctccattaagccaggtacccctgcagctcagtacttggatgagcacggtgtggaacgccacgactacaactccctgggttccaggcgtggtaaccacgaggtcatgatgcgcggcaccttcgccaacatccgcctccagaaccagctggttgacatcgcaggtggctacacccgcgacttcacccaggagggtgctccacaggcgttcatctacgacgcttccgtcaactacaaggctgctggcattccgctggtcgtcttgggcggcaaggagtacggcaccggttcttcccgtgactgggcagctaagggcactaacctgctcggaattcgcgcagttatcaccgagtccttcgagcgtattcaccgctccaacctcatcggtatgggcgttgtcccactgcagttccctgcaggcgaatcccacgagtccctgggccttgacggcaccgagaccttcgacatcaccggactgaccgcactcaacgagggcgagactcctaagactgtcaaggtcaccgcaaccaaggagaacggcgacgtcgtcgagttcgacgcagttgtccgcatcgacaccccaggtgaggctgactactaccgccacggcggcatcctgcagtacgtgctgcgtcagatggctgcttcttctaag

SEQ ID NO: 84 - protein, 943 aa, Corynebacterium glutamicum
MELTVTESKNSFNAKSTLEVGDKSYDYFALSAVPGMEKLPYSLKVLGENLLRTEDGANITNEHIEAIANWDASSDPSIEIQFTPARVLMQDFTGVPCVVDLATMREAVAALGGDPNDVNPLNPAEMVIDHSVIVEAFGRPDALAKNVEIEYERNEERYQFLRWGSESFSNFRVVPPGTGIVHQVNIEYLARVVFDNEGLAYPDTCIGTDSHTTMENGLGILGWGVGGIEAEAAMLGQPVSMLIPRVVGFKLTGEIPVGVTATDVVLTITEMLRDHGVVQKFVEFYGSGVKAVPLANRATIGNMSPEFGSTCAMFPIDEETTKYLRLTGRPEEQVALVEAYAKAQGMWLDEDTVEAEYSEYLELDLSTVVPSIAGPKRPQDRILLSEAKEQFRKDLPTYTDDAVSVDTSIPATRMVNEGGGQPEGGVEADNYNASWAGSGESLATGAEGRPSKPVTVASPQGGEYTIDHGMVAIASITSCTNTSNPSVMIGAGLIARKAAEKGLKSKPWVKTICAPGSQVVDGYYQRADLWKDLEAMGFYLSGFGCTTCIGNSGPLPEEISAAINEHDLTATAVLSGNRNFEGRISPDVKMNYLASPIMVIAYAIAGTMDFDFENEALGQDQDGNDVFLKDIWPSTEEIEDTIQQAISRELYEADYADVFKGDKQWQELDVPTGDTFEWDENSTYIRKAPYFDGMPVEPVAVTDIQGARVLAKLGDSVTTDHISPASSIKPGTPAAQYLDEHGVERHDYNSLGSRRGNHEVMMRGTFANIRLQNQLVDIAGGYTRDFTQEGAPQAFIYDASVNYKAAGIPLVVLGGKEYGTGSSRDWAAKGTNLLGIRAVITESFERIHRSNLIGMGVVPLQFPAGESHESLGLDGTETFDITGLTALNEGETPKTVKVTATKENGDVVEFDAVVRIDTPGEADYYRHGGILQYVLRQMAASSK

SEQ ID NO: 85 - DNA, 1293 bp, Corynebacterium glutamicum
  CDS (1)..(1293): RXA02175W
gtggctactgataacaacaaggctgtcctgcactaccccggtggcgagttcgaaatggacatcatcgaggcttctgagggtaacaacggtgttgtcctgggcaagatgctgtctgagactggactgatcacttttgacccaggttatgtgagcactggctccaccgagtcgaagatcacctacatcgatggcgatgcgggaatcctgcgttaccgcggctatgacatcgctgatctggctgagaatgccaccttcaacgaggtttcttacctacttatcaacggtgagctaccaaccccagatgagcttcacaagtttaacgacgagattcgccaccacacccttctggacgaggacttcaagtcccagttcaacgtgttcccacgcgacgctcacccaatggcaaccttggcttcctcggttaacattttgtctacctactaccaggaccagctgaacccactcgatgaggcacagcttgataaggcaaccgttcgcctcatggcaaaggttccaatgctggctgcgtacgcacaccgcgcacgcaagggtgctccttacatgtacccagacaactccctcaatgcgcgtgagaacttcctgcgcatgatgttcggttacccaaccgagccatacgagatcgacccaatcatggtcaaggctctggacaagctgctcatcctgcacgctgaccacgagcagaactgctccacctccaccgttcgtatgatcggttccgcacaggccaacatgtttgtctccatcgctggtggcatcaacgctctgtccggcccactgcacggtggcgcaaaccaggctgttctggagatgctcgaagacatcaagagcaaccacggtggcgacgcaaccgagttcatgaacaaggtcaagaacaaggaagacggcgtccgcctcatgggcttcggacaccgcgtttacaagaactacgatccacgtgcagcaatcgtcaaggagaccgcacacgagatcctcgagcacctcggtggcgacgatcttctggatctggcaatcaagctggaagaaattgcactggctgatgattacttcatctcccgcaagctctacccgaacgtagacttctacaccggcctgatctaccgcgcaatgggcttcccaactgacttcttcaccgtattgttcgcaatcggtcgtctgccaggatggatcgctcactaccgcgagcagctcggtgcagcaggcaacaagatcaaccgcccacgccaggtctacaccggcaacgaatcccgcaagttggttcctcgcgaggagcgc

SEQ ID NO: 86 - protein, 431 aa, Corynebacterium glutamicum
MATDNNKAVLHYPGGEFEMDIIEASEGNNGVVLGKMLSETGLITFDPGYVSTGSTESKITYIDGDAGILRYRGYDIADLAENATFNEVSYLLINGELPTPDELHKFNDEIRHHTLLDEDFKSQFNVFPRDAHPMATLASSVNILSTYYQDQLNPLDEAQLDKATVRLMAKVPMLAAYAHRARKGAPYMYPDNSLNARENFLRMMFGYPTEPYEIDPIMVKALDKLLILHADHEQNCSTSTVRMIGSAQANMFVSIAGGINALSGPLHGGANQAVLEMLEDIKSNHGGDATEFMNKVKNKEDGVRLMGFGHRVYKNYDPRAAIVKETAHEILEHLGGDDLLDLAIKLEEIALADDYFISRKLYPNVDFYTGLIYRAMGFPTDFFTVLFAIGRLPGWIAHYREQLGAAGNKINRPRQVYTGNESRKLVPREER

SEQ ID NO: 87 - DNA, 1311 bp, Corynebacterium glutamicum
  CDS (1)..(1311): RXA02175E
atgtttgaaagggatatcgtggctactgataacaacaaggctgtcctgcactaccccggtggcgagttcgaaatggacatcatcgaggcttctgagggtaacaacggtgttgtcctgggcaagatgctgtctgagactggactgatcacttttgacccaggttatgtgagcactggctccaccgagtcgaagatcacctacatcgatggcgatgcgggaatcctgcgttaccgcggctatgacatcgctgatctggctgagaatgccaccttcaacgaggtttcttacctacttatcaacggtgagctaccaaccccagatgagcttcacaagtttaacgacgagattcgccaccacacccttctggacgaggacttcaagtcccagttcaacgtgttcccacgcgacgctcacccaatggcaaccttggcttcctcggttaacattttgtctacctactaccaggaccagctgaacccactcgatgaggcacagcttgataaggcaaccgttcgcctcatggcaaaggttccaatgctggctgcgtacgcacaccgcgcacgcaagggtgctccttacatgtacccagacaactccctcaatgcgcgtgagaacttcctgcgcatgatgttcggttacccaaccgagccatacgagatcgacccaatcatggtcaaggctctggacaagctgctcatcctgcacgctgaccacgagcagaactgctccacctccaccgttcgtatgatcggttccgcacaggccaacatgtttgtctccatcgctggtggcatcaacgctctgtccggcccactgcacggtggcgcaaaccaggctgttctggagatgctcgaagacatcaagagcaaccacggtggcgacgcaaccgagttcatgaacaaggtcaagaacaaggaagacggcgtccgcctcatgggcttcggacaccgcgtttacaagaactacgatccacgtgcagcaatcgtcaaggagaccgcacacgagatcctcgagcacctcggtggcgacgatcttctggatctggcaatcaagctggaagaaattgcactggctgatgattacttcatctcccgcaagctctacccgaacgtagacttctacaccggcctgatctaccgcgcaatgggcttcccaactgacttcttcaccgtattgttcgcaatcggtcgtctgccaggatggatcgctcactaccgcgagcagctcggtgcagcaggcaacaagatcaaccgcccacgccaggtctacaccggcaacgaatcccgcaagttggttcctcgcgaggagcgc

SEQ ID NO: 88 - protein, 437 aa, Corynebacterium glutamicum [sequence omitted]

SEQ ID NO: 89 - DNA, 3663 bp, Corynebacterium glutamicum
  CDS (1)..(3663): RXA04186K
atgtctacttcagttacttcaccagcccacaacaacgcacattcctccgaatttttggatgcgttggcaaaccatgtgttgatcggcgacggcgccatgggcacccagctccaaggctttgacctggacgtggaaaaggatttccttgatctggaggggtgtaatgagattctcaacgacacccgccctgatgtgttgaggcagattcaccgcgcctactttgaggcgggagctgacttggttgagaccaatacttttggttgcaacctgccgaacttggcggattatgacatcgctgatcgttgccgtgagcttgcctacaagggcactgcagtggctagggaagtggctgatgagatggggccgggccgaaacggcatgcggcgtttcgtggttggttccctgggacctggaacgaagcttccatcgctgggccatgcaccgtatgcagatttgcgtgggcactacaaggaagcagcgcttggcatcatcgacggtggtggcgatgcctttttgattgagactgctcaggacttgcttcaggtcaaggctgcggttcacggcgttcaagatgccatggctgaacttgatacattcttgcccattatttgccacgtcaccgtagagaccaccggcaccatgctcatgggttctgagatcggtgccgcgttgacagcgctgcagccactgggtatcgacatgattggtctgaactgcgccaccggcccagatgagatgagcgagcacctgcgttacctgtccaagcacgccgatattcctgtgtcggtgatgcctaacgcaggtcttcctgtcctgggtaaaaacggtgcagaatacccacttgaggctgaggatttggcgcaggcgctggctggattcgtctccgaatatggcctgtccatggtgggtggttgttgtggcaccacacctgagcacatccgtgcggtccgcgatgcggtggttggtgttccagagcaggaaacctccacactgaccaagatccctgcaggccctgttgagcaggcctcccgcgaggtggagaaagaggactccgtcgcgtcgctgtacacctcggtgccattgtcccaggaaaccggcatttccatgatcggtgagcgcaccaactccaacggttccaaggcattccgtgaggcaatgctgtctggcgattgggaaaagtgtgtggatattgccaagcagcaaacccgcgatggtgcacacatgctggatctttgtgtggattacgtgggacgagacggcaccgccgatatggcgaccttggcagcacttcttgctaccagctccactttgccaatcatgattgactccaccgagccagaggttattcgcacaggccttgagcacttgggtggacgaagcatcgttaactccgtcaactttgaagacggcgatggccctgagtcccgctaccagcgcatcatgaaactggtaaagcagcacggtgcggccgtggttgcgctgaccattgatgaggaaggccaggcacgtaccgctgagcacaaggtgcgcattgctaaacgactgattgacgatatcaccggcagctacggcctggatatcaaagacatcgttgtggactgcctgaccttcccgatctctactggccaggaagaaaccaggcgagatggcattgaaaccatcgaagccatccgcgagctgaagaagctctacccagaaatccacaccaccctgggtctgtccaatatttccttcggcctgaaccctgctgcacgccaggttcttaactctgtgttcctcaatgagtgcattgaggctggtctggactctgcgattgcgcacagctccaagattttgccgatgaaccgcattgatgatcgccagcgcgaagtggcgttggatatggtctatgatcgccgcaccgaggattacgatccgctgcaggaattcatgcagctgtttgagggcgtttctgctgccgatgccaaggatgctcgcgctgaacagctggccgctatgcctttgtttgagcgtttggcacagcgcatcatcgacggcgataagaatggccttgaggatgatctggaagcaggcatgaaggagaagtctcctattgcgatcatcaacgaggaccttctcaacggcatgaagaccgtgggtgagctgtttggttccggacagatgcagctgccattcgtgctgcaatcggcagaaaccatgaaaactgcggtggcctatttggaaccgttcatggaagaggaagcagaagctaccggatctgcgcaggcagagggcaagggcaaaatcgtcgtggccaccgtcaagggtgacgtgcacgatatcggcaagaacttggtggacatcattttgtccaacaacggttacgacgtggtgaacttgggcatcaagcagccactgtccgccatgttggaagcagcggaagaacacaaagcagacgtcatcggcatgtcgggacttcttgtgaagtccaccgtggtgatgaaggaaaaccttgaggagatgaacaacgccggcgcatccaattacccagtcattttgggtggcgctgcgctgacgcgtacctacgtggaaaacgatctcaacgaggtgtacaccggtgaggtgtactacgcccgtgatgctttcgagggcctgcgcctgatggatgaggtgatggcagaaaagcgtggtgaaggacttgatcccaactcaccagaagctattgagcaggcgaagaagaaggcggaacgtaaggctcgtaatgagcgttcccgcaagattgccgcggagcgtaaagctaatgcggctcccgtgattgttccggagcgttctgatgtctccaccgatactccaaccgcggcaccaccgttctggggaacccgcattgtcaagggtctgcccttggcggagttcttgggcaaccttgatgagcgcgccttgttcatggggcagtggggtctgaaatccacccgcggcaacgagggtccaagctatgaggatttggtggaaactgaaggccgaccacgcctgcgctactggctggatcgcctgaagtctgagggcattttggaccacgtggccttggtgtatggctacttcccagcggtcgcggaaggcgatgacgtggtgatcttggaatccccggatccacacgcagccgaacgcatgcgctttagcttcccacgccagcagcgcggcaggttcttgtgcatcgcggatttcattcgcccacgcgagcaagctgtcaaggacggccaagtggacgtcatgccattccagctggtcaccatgggtaatcctattgctgatttcgccaacgagttgttcgcagccaatgaataccgcgagtacttggaagttcacggcatcggcgtgcagctcaccgaagcattggccgagtactggcactcccgagtgcgcagcgaactcaagctgaacgacggtggatctgtcgctgattttgatccagaagacaagaccaagttcttcgacctggattaccgcggcgcccgcttctcctttggttacggttcttgccctgatctggaagaccgcgcaaagctggtggaattgctcgagccaggccgtatcggcgtggagttgtccgaggaactccagctgcacccagagcagtccacagacgcgtttgtgctctaccacccagaggcaaagtactttaacgtc

SEQ ID NO: 90 - protein, 1221 aa, Corynebacterium glutamicum
MSTSVTSPAHNNAHSSEFLDALANHVLIGDGAMGTQLQGFDLDVEKDFLDLEGCNEILNDTRPDVLRQIHRAYFEAGADLVETNTFGCNLPNLADYDIADRCRELAYKGTAVAREVADEMGPGRNGMRRFVVGSLGPGTKLPSLGHAPYADLRGHYKEAALGIIDGGGDAFLIETAQDLLQVKAAVHGVQDAMAELDTFLPIICHVTVETTGTMLMGSEIGAALTALQPLGIDMIGLNCATGPDEMSEHLRYLSKHADIPVSVMPNAGLPVLGKNGAEYPLEAEDLAQALAGFVSEYGLSMVGGCCGTTPEHIRAVRDAVVGVPEQETSTLTKIPAGPVEQASREVEKEDSVASLYTSVPLSQETGISMIGERTNSNGSKAFREAMLSGDWEKCVDIAKQQTRDGAHMLDLCVDYVGRDGTADMATLAALLATSSTLPIMIDSTEPEVIRTGLEHLGGRSIVNSVNFEDGDGPESRYQRIMKLVKQHGAAVVALTIDEEGQARTAEHKVRIAKRLIDDITGSYGLDIKDIVVDCLTFPISTGQEETRRDGIETIEAIRELKKLYPEIHTTLGLSNISFGLNPAARQVLNSVFLNECIEAGLDSAIAHSSKILPMNRIDDRQREVALDMVYDRRTEDYDPLQEFMQLFEGVSAADAKDARAEQLAAMPLFERLAQRIIDGDKNGLEDDLEAGMKEKSPIAIINEDLLNGMKTVGELFGSGQMQLPFVLQSAETMKTAVAYLEPFMEEEAEATGSAQAEGKGKIVVATVKGDVHDIGKNLVDIILSNNGYDVVNLGIKQPLSAMLEAAEEHKADVIGMSGLLVKSTVVMKENLEEMNNAGASNYPVILGGAALTRTYVENDLNEVYTGEVYYARDAFEGLRLMDEVMAEKRGEGLDPNSPEAIEQAKKKAERKARNERSRKIAAERKANAAPVIVPERSDVSTDTPTAAPPFWGTRIVKGLPLAEFLGNLDERALFMGQWGLKSTRGNEGPSYEDLVETEGRPRLRYWLDRLKSEGILDHVALVYGYFPAVAEGDDVVILESPDPHAAERMRFSFPRQQRGRFLCIADFIRPREQAVKDGQVDVMPFQLVTMGNPIADFANELFAANEYREYLEVHGIGVQLTEALAEYWHSRVRSELKLNDGGSVADFDPEDKTKFFDLDYRGARFSFGYGSCPDLEDRAKLVELLEPGRIGVELSEELQLHPEQSTDAFVLYHPEAKYFNV

SEQ ID NO: 91 - DNA, 1758 bp, Corynebacterium glutamicum
  CDS (1)..(1755): RXA00098E
atggccacgtcgaaaagcagcccaataaacgcacctaaatttgtcgtgtttcccactttgaacactcttcgatgcgcttggccacaaaagcaagctaacctgaagatgttatttaacgacaataaaggagttttcatggcggacatttcgaccacccaggtttggcaagacctgaccgatcattactcaaacttccaggcaaccactctgcgtgaacttttcaaggaagaaaaccgcgccgagaagtacaccttctccgcggctggcctccacgtcgacctgtcgaagaatctgcttgacgacgccaccctcaccaagctccttgcactgaccgaagaatctggccttcgcgaacgcattgacgcgatgtttgccggtgaacacctcaacaacaccgaagaccgcgctgtcctccacaccgcgctgcgccttcctgccgaagctgatctgtcagtagatggccaagatgttgctgctgatgtccacgaagttttgggacgcatgcgtgacttcgctactgcgctgcgctcaggcaactggttgggacacaccggccacacgatcaagaagatcgtcaacattggtatcggtggctctgacctcggaccagccatggctacgaaggctctgcgtgcatacgcgaccgctggtatctcagcagaattcgtctccaacgtcgacccagcagacctcgtttctgtgttggaagacctcgatgcagaatccacattgttcgtgatcgcttcgaaaactttcaccacccaggagacgctgtccaacgctcgtgcagctcgtgcttggctggtagagaagctcggtgaagaggctgtcgcgaagcacttcgtcgcagtgtccaccaatgctgaaaaggtcgcagagttcggtatcgacacggacaacatgttcggcttctgggactgggtcggaggtcgttactccgtggactccgcagttggtctttccctcatggcagtgatcggccctcgcgacttcatgcgtttcctcggtggattccacgcgatggatgaacacttccgcaccaccaagttcgaagagaacgttccaatcttgatggctctgctcggtgtctggtactccgatttctatggtgcagaaacccacgctgtcctaccttattccgaggatctcagccgttttgctgcttacctccagcagctgaccatggaatcaaatggcaagtcagtccaccgcgacggctcccctgtttccactggcactggcgaaatttactggggtgagcctggcacaaatggccagcacgctttcttccagctgatccaccagggcactcgccttgttccagctgatttcattggtttcgctcgtccaaagcaggatcttcctgccggtgagcgcaccatgcatgaccttttgatgagcaacttcttcgcacagaccaaggttttggctttcggtaagaacgctgaagagatcgctgcggaaggtgtcgcacctgagctggtcaaccacaaggtcatgccaggtaatcgcccaaccaccaccattttggcggaggaacttaccccttctattctcggtgcgttgatcgctttgtacgaacacatcgtgatggttcagggcgtgatttgggacatcaactccttcgaccaatggggtgttgaactgggcaaacagcaggcaaatgacctcgctccggctgtctctggtgaagaggatgttgactcgggagattcttccactgattcactgattaagtggtaccgcgcaaataggtag

SEQ ID NO: 92 - protein, 585 aa, Corynebacterium glutamicum
MATSKSSPINAPKFVVFPTLNTLRCAWPQKQANLKMLFNDNKGVFMADISTTQVWQDLTDHYSNFQATTLRELFKEENRAEKYTFSAAGLHVDLSKNLLDDATLTKLLALTEESGLRERIDAMFAGEHLNNTEDRAVLHTALRLPAEADLSVDGQDVAADVHEVLGRMRDFATALRSGNWLGHTGHTIKKIVNIGIGGSDLGPAMATKALRAYATAGISAEFVSNVDPADLVSVLEDLDAESTLFVIASKTFTTQETLSNARAARAWLVEKLGEEAVAKHFVAVSTNAEKVAEFGIDTDNMFGFWDWVGGRYSVDSAVGLSLMAVIGPRDFMRFLGGFHAMDEHFRTTKFEENVPILMALLGVWYSDFYGAETHAVLPYSEDLSRFAAYLQQLTMESNGKSVHRDGSPVSTGTGEIYWGEPGTNGQHAFFQLIHQGTRLVPADFIGFARPKQDLPAGERTMHDLLMSNFFAQTKVLAFGKNAEEIAAEGVAPELVNHKVMPGNRPTTTILAEELTPSILGALIALYEHIVMVQGVIWDINSFDQWGVELGKQQANDLAPAVSGEEDVDSGDSSTDSLIKWYRANR

SEQ ID NO: 93 - DNA, 1503 bp, Corynebacterium glutamicum
  CDS (1)..(1503): RXA00241K
gtgaatactcaatcagattctgcggggtctcaaggtgcagcggccacaagtcgtactgtatctattagaaccctcatcgcgctgatcatcggatcgaccgtcggcgcgggaattttctccatccctcaaaacatcggctcagtcgcaggtcccggcgcgatgctcatcggctggctgatcgccggtgtgggcatgttgtccgtagcgttcgtgttccatgttcttgcccgccgtaaacctcacctcgattctggcgtctacgcatatgcgcgtgttggattgggcgattatgtaggtttctcctccgcttggggttattggctgggttcagtcatcgcccaagttggctacgcaacgttatttttctccacgttgggccactacgtaccgctgttttcccaagatcatccatttgtgtcagcgttggcagttagcgctttgacctggctggtgtttggagttgtttcccgaggaattagccaagctgctttcttgacaacggtcaccaccgtggccaaaattctgcctctgttgtgcttcatcatccttgttgcattcttgggctttagctgggagaagttcactgttgatttatgggcgcgtgatggtggcgtgggcagcatttttgatcaggtgcgcggcatcatggtgtacaccgtgtgggtgttcatcggtatcgaaggtgcatcggtatattcccgccaggcacgctcacgcagtgatgtcagccgagctaccgtgattggttttgtggctgttctccttttgctggtgtcgatttcttcgctgagcttcggtgtactgacccaacaagagctcgctgcgttaccagataattccatggcgtcggtgctcgaagctgttgttggtccatggggtgccgcattgatttcgttgggtctgtgtctttcggttcttggggcctatgtgtcctggcagatgctctgcgcagaaccactggcgttgatggcaatggatggcctcattccaagcaaaatcggggccatcaacagccgcggtgctgcctggatggctcagctgatctccaccatcgtgattcagattttcatcatcattttcttcctcaacgagaccacctacgtctccatggtgcaattggctaccaacctatacttggtgccttacctgttctctgccttttatctggtcatgctggcaacacgtggaaaaggaatcacccacccacatgccggcacacgttttgatgattccggtccagagatatcccgccgagaaaaccgcaaacacctcatcgtcggtttagtagcaacggtgtattcagtgtggctgttttacgctgcagaaccgcagtttgtcctcttcggagccatggcgatgcttcccggcttaatcccctatgtgtggacaaggatttatcgtggcgaacaggtgtttaaccgctttgaaatcggcgtggttgttgtcctggtcgttgctgccagcgcgggcgttattggtttggtcaacggatcactatcgctt

SEQ ID NO: 94 - protein, 501 aa, Corynebacterium glutamicum
MNTQSDSAGSQGAAATSRTVSIRTLIALIIGSTVGAGIFSIPQNIGSVAGPGAMLIGWLIAGVGMLSVAFVFHVLARRKPHLDSGVYAYARVGLGDYVGFSSAWGYWLGSVIAQVGYATLFFSTLGHYVPLFSQDHPFVSALAVSALTWLVFGVVSRGISQAAFLTTVTTVAKILPLLCFIILVAFLGFSWEKFTVDLWARDGGVGSIFDQVRGIMVYTVWVFIGIEGASVYSRQARSRSDVSRATVIGFVAVLLLLVSISSLSFGVLTQQELAALPDNSMASVLEAVVGPWGAALISLGLCLSVLGAYVSWQMLCAEPLALMAMDGLIPSKIGAINSRGAAWMAQLISTIVIQIFIIIFFLNETTYVSMVQLATNLYLVPYLFSAFYLVMLATRGKGITHPHAGTRFDDSGPEISRRENRKHLIVGLVATVYSVWLFYAAEPQFVLFGAMAMLPGLIPYVWTRIYRGEQVFNRFEIGVVVVLVVAASAGVIGLVNGSLSL

SEQ ID NO: 95 - DNA, 1086 bp, Corynebacterium glutamicum
  CDS (1)..(1086): RXA00517E
ttgctggtatacatttcggtatacctaaaccgaattgagggattcatgccagaagtcactgtcaacgcccaacaactcactgttctctgcacagacatcctcaccaaaactggagtacctgcagcagacgcccatcttgtcggtgatagtttggtgcaggctgatctttggggtcacccctcccacggtgtgcttcgactgccttggtatgtgcgcagactccacagtggcgcgatgactacacatgcacacgtggaggttctcaatgatttgggtgccgtgttggcgttggatggacacaatggaatcggccaagttttagctgatcatgctcgtaaagaagcagtgactagggcaatgatgttcggcatcggtgcggtgtcggtgcgcaactccaatcattttggaactgccatgtactacacccggaaagcggcagcgcaaggatgtgtttccattctcaccaccaatgcatctccggcgatggcgccctggggtggcagagaaaaacggatcggtaccaacccatggtctattgcggcaccttttggagaaacggctacggtagtcgatatagccaatactgcggttgcgcgcggaaagatctaccacgcacgacagacaaacatgcccattcctgagacttgggcgatcacgagtgagggcgcacccaccacggatcctgctgaggcaatcaacggtgtcgtccttcccatggctggtcacaaaggttatgcgattagcttcatgatggatgtgctttctggagttctcactggttcccagcacagcaccaaggtacatggtccgtatgatcccactcccccaggtggagctggccacttgttcatcgcgttggatgttgcagcgtttcgcgatccacaagatttcgatgacgcactcagcgatctggttggggaagttaaatccactccgaaagcacaaaacaccgaggagattttctaccccggtgaatcggaagaccgtgcgcatcggaaaaactctgcgcacggtatttcattgcctgaaaaaacgtggatggaactgcaagaactggcaatcgagaaccatgttgtaactcaccgt

SEQ ID NO: 96 - protein, 362 aa, Corynebacterium glutamicum
MLVYISVYLNRIEGFMPEVTVNAQQLTVLCTDILTKTGVPAADAHLVGDSLVQADLWGHPSHGVLRLPWYVRRLHSGAMTTHAHVEVLNDLGAVLALDGHNGIGQVLADHARKEAVTRAMMFGIGAVSVRNSNHFGTAMYYTRKAAAQGCVSILTTNASPAMAPWGGREKRIGTNPWSIAAPFGETATVVDIANTAVARGKIYHARQTNMPIPETWAITSEGAPTTDPAEAINGVVLPMAGHKGYAISFMMDVLSGVLTGSQHSTKVHGPYDPTPPGGAGHLFIALDVAAFRDPQDFDDALSDLVGEVKSTPKAQNTEEIFYPGESEDRAHRKNSAHGISLPEKTWMELQELAIENHVVTHR

SEQ ID NO: 97 - DNA, 1041 bp, Corynebacterium glutamicum
  CDS (1)..(1041): RXA00517W
atgccagaagtcactgtcaacgcccaacaactcactgttctctgcacagacatcctcaccaaaactggagtacctgcagcagacgcccatcttgtcggtgatagtttggtgcaggctgatctttggggtcacccctcccacggtgtgcttcgactgccttggtatgtgcgcagactccacagtggcgcgatgactacacatgcacacgtggaggttctcaatgatttgggtgccgtgttggcgttggatggacacaatggaatcggccaagttttagctgatcatgctcgtaaagaagcagtgactagggcaatgatgttcggcatcggtgcggtgtcggtgcgcaactccaatcattttggaactgccatgtactacacccggaaagcggcagcgcaaggatgtgtttccattctcaccaccaatgcatctccggcgatggcgccctggggtggcagagaaaaacggatcggtaccaacccatggtctattgcggcaccttttggagaaacggctacggtagtcgatatagccaatactgcggttgcgcgcggaaagatctaccacgcacgacagacaaacatgcccattcctgagacttgggcgatcacgagtgagggcgcacccaccacggatcctgctgaggcaatcaacggtgtcgtccttcccatggctggtcacaaaggttatgcgattagcttcatgatggatgtgctttctggagttctcactggttcccagcacagcaccaaggtacatggtccgtatgatcccactcccccaggtggagctggccacttgttcatcgcgttggatgttgcagcgtttcgcgatccacaagatttcgatgacgcactcagcgatctggttggggaagttaaatccactccgaaagcacaaaacaccgaggagattttctaccccggtgaatcggaagaccgtgcgcatcggaaaaactctgcgcacggtatttcattgcctgaaaaaacgtggatggaactgcaagaactggcaatcgagaaccatgttgtaactcaccgt

SEQ ID NO: 98 - protein, 347 aa, Corynebacterium glutamicum
MPEVTVNAQQLTVLCTDILTKTGVPAADAHLVGDSLVQADLWGHPSHGVLRLPWYVRRLHSGAMTTHAHVEVLNDLGAVLALDGHNGIGQVLADHARKEAVTRAMMFGIGAVSVRNSNHFGTAMYYTRKAAAQGCVSILTTNASPAMAPWGGREKRIGTNPWSIAAPFGETATVVDIANTAVARGKIYHARQTNMPIPETWAITSEGAPTTDPAEAINGVVLPMAGHKGYAISFMMDVLSGVLTGSQHSTKVHGPYDPTPPGGAGHLFIALDVAAFRDPQDFDDALSDLVGEVKSTPKAQNTEEIFYPGESEDRAHRKNSAHGISLPEKTWMELQELAIENHVVTHR

SEQ ID NO: 99 - DNA, 2214 bp, Corynebacterium glutamicum
  CDS (1)..(2214): RXA00519W
atggctaagatcatctggacccgcaccgacgaagcaccgctgctcgcgacctactcgctgaagccggtcgtcgaggcatttgctgctaccgcgggcattgaggtcgagacccgggacatttcactcgctggacgcatcctcgcccagttcccagagcgcctcaccgaagatcagaaggtaggcaacgcactcgcagaactcggcgagcttgctaagactcctgaagcaaacatcattaagcttccaaacatctccgcttctgttccacagctcaaggctgctattaaggaactgcaggaccagggctacgacatcccagaactgcctgataacgccaccaccgacgaggaaaaagacatcctcgcacgctacaacgctgttaagggttccgctgtgaacccagtgctgcgtgaaggcaactctgaccgccgcgcaccaatcgctgtcaagaactttgttaagaagttcccacaccgcatgggcgagtggtctgcagattccaagaccaacgttgcaaccatggatgcaaacgacttccgccacaacgagaagtccatcatcctcgacgctgctgatgaagttcagatcaagcacatcgcagctgacggcaccgagaccatcctcaaggacagcctcaagcttcttgaaggcgaagttctagacggaaccgttctgtccgcaaaggcactggacgcattccttctcgagcaggtcgctcgcgcaaaggcagaaggtatcctcttctccgcacacctgaaggccaccatgatgaaggtctccgacccaatcatcttcggccacgttgtgcgcgcttacttcgcagacgttttcgcacagtacggtgagcagctgctcgcagctggcctcaacggcgaaaacggcctcgctgcaatcctctccggcttggagtccctggacaacggcgaagaaatcaaggctgcattcgagaagggcttggaagacggcccagacctggccatggttaactccgctcgcggcatcaccaacctgcatgtcccttccgatgtcatcgtggacgcttccatgccagcaatgattcgtacctccggccacatgtggaacaaagacgaccaggagcaggacaccctggcaatcatcccagactcctcctacgctggcgtctaccagaccgttatcgaagactgccgcaagaacggcgcattcgatccaaccaccatgggtaccgtccctaacgttggtctgatggctcagaaggctgaagagtacggctcccatgacaagaccttccgcatcgaagcagacggtgtggttcaggttgtttcctccaacggcgacgttctcatcgagcacgacgttgaggcaaatgacatctggcgtgcatgccaggtcaaggatgccccaatccaggattgggtaaagcttgctgtcacccgctcccgtctctccggaatgcctgcagtgttctggttggatccagagcgcgcacacgaccgcaacctggcttccctcgttgagaagtacctggctgaccacgacaccgagggcctggacatccagatcctctcccctgttgaggcaacccagctctccatcgaccgcatccgccgtggcgaggacaccatctctgtcaccggtaacgttctgcgtgactacaacaccgacctcttcccaatcctggagctgggcacctctgcaaagatgctgtctgtcgttcctttgatggctggcggcggactgttcgagaccggtgctggtggatctgctcctaagcacgtccagcaggttcaggaagaaaaccacctgcgttgggattccctcggtgagttcctcgcactggctgagtccttccgccacgagctcaacaacaacggcaacaccaaggccggcgttctggctgacgctctggacaaggcaactgagaagctgctgaacgaagagaagtccccatcccgcaaggttggcgagatcgacaaccgtggctcccacttctggctgaccaagttctgggctgacgagctcgctgctcagaccgaggacgcagatctggctgctaccttcgcaccagtcgcagaagcactgaacacaggcgctgcagacatcgatgctgcactgctcgcagttcagggtggagcaactgaccttggtggctactactcccctaacgaggagaagctcaccaacatcatgcgcccagtcgcacagttcaacgagatcgttgacgcactgaagaag

SEQ ID NO: 100 - protein, 738 aa, Corynebacterium glutamicum
MAKIIWTRTDEAPLLATYSLKPVVEAFAATAGIEVETRDISLAGRILAQFPERLTEDQKVGNALAELGELAKTPEANIIKLPNISASVPQLKAAIKELQDQGYDIPELPDNATTDEEKDILARYNAVKGSAVNPVLREGNSDRRAPIAVKNFVKKFPHRMGEWSADSKTNVATMDANDFRHNEKSIILDAADEVQIKHIAADGTETILKDSLKLLEGEVLDGTVLSAKALDAFLLEQVARAKAEGILFSAHLKATMMKVSDPIIFGHVVRAYFADVFAQYGEQLLAAGLNGENGLAAILSGLESLDNGEEIKAAFEKGLEDGPDLAMVNSARGITNLHVPSDVIVDASMPAMIRTSGHMWNKDDQEQDTLAIIPDSSYAGVYQTVIEDCRKNGAFDPTTMGTVPNVGLMAQKAEEYGSHDKTFRIEADGVVQVVSSNGDVLIEHDVEANDIWRACQVKDAPIQDWVKLAVTRSRLSGMPAVFWLDPERAHDRNLASLVEKYLADHDTEGLDIQILSPVEATQLSIDRIRRGEDTISVTGNVLRDYNTDLFPILELGTSAKMLSVVPLMAGGGLFETGAGGSAPKHVQQVQEENHLRWDSLGEFLALAESFRHELNNNGNTKAGVLADALDKATEKLLNEEKSPSRKVGEIDNRGSHFWLTKFWADELAAQTEDADLAATFAPVAEALNTGAADIDAALLAVQGGATDLGGYYSPNEEKLTNIMRPVAQFNEIVDALKK

SEQ ID NO: 101 - DNA, 984 bp, Corynebacterium glutamicum
  CDS (1)..(984): RXA00533E
atgcgcacccttttggaagagcgcaatttcccagctgacactgttcgtttctttgcttccccacgttccgcaggccgtaagattgaattccgtggcacggaaatcgaggtagaagacattactcaggcaaccgaggagtccctcaaggacatcgacgttgcgttgttctccgctggaggcaccgcttccaagcagtacgctccactgttcgctgctgcaggcgcgactgttgtggataactcttctgcttggcgcaaggacgacgaggttccactaatcgtctctgaggtgaacccttccgacaaggattccctggtcaagggcattattgcgaaccctaactgcaccaccatggctgcgatgccagtgctgaagccacttcacgatgccgctggtcttgtaaagcttcacgtttcctcttaccaggctgtttccggttctggtcttgcaggtgtggaaaccttggcaaagcaggttgctgcagttggagaccacaacgttgagttcgtccatgatggacaggctgctgacgcaggcgatgtcggaccttatgtttcaccaatcgcttacaacgtgctgccattcgccggaaacctcgtcgatgacggcaccttcgaaaccgatgaagagcagaagctgcgcaacgaatcccgcaagattctcggtctcccagacctcaaggtctcaggcacctgcgtccgcgtgccggttttcaccggccacacgctgaccattcacgccgaattcgacaaggcaatcaccgtggaccaggcgcaggagatcttgggtgccgcttcaggcgtcaagcttgtcgacgtcccaaccccacttgcagctgccggcattgacgaatccctcgttggacgcatccgtcaggactccactgtcgacgataaccgcggtctggttctcgtcgtatctggcgacaacctccgcaagggtgctgcgctaaacaccatccagatcgctgagctgctggttaag

SEQ ID NO: 102 - protein, 328 aa, Corynebacterium glutamicum
MRTLLEERNFPADTVRFFASPRSAGRKIEFRGTEIEVEDITQATEESLKDIDVALFSAGGTASKQYAPLFAAAGATVVDNSSAWRKDDEVPLIVSEVNPSDKDSLVKGIIANPNCTTMAAMPVLKPLHDAAGLVKLHVSSYQAVSGSGLAGVETLAKQVAAVGDHNVEFVHDGQAADAGDVGPYVSPIAYNVLPFAGNLVDDGTFETDEEQKLRNESRKILGLPDLKVSGTCVRVPVFTGHTLTIHAEFDKAITVDQAQEILGAASGVKLVDVPTPLAAAGIDESLVGRIRQDSTVDDNRGLVLVVSGDNLRKGAALNTIQIAELLVK

SEQ ID NO: 103 - DNA, 1032 bp, Corynebacterium glutamicum
  CDS (1)..(1032): RXA00533K
atgaccaccatcgcagttgttggtgcaaccggccaggtcggccaggttatgcgcacccttttggaagagcgcaatttcccagctgacactgttcgtttctttgcttccccacgttccgcaggccgtaagattgaattccgtggcacggaaatcgaggtagaagacattactcaggcaaccgaggagtccctcaaggacatcgacgttgcgttgttctccgctggaggcaccgcttccaagcagtacgctccactgttcgctgctgcaggcgcgactgttgtggataactcttctgcttggcgcaaggacgacgaggttccactaatcgtctctgaggtgaacccttccgacaaggattccctggtcaagggcattattgcgaaccctaactgcaccaccatggctgcgatgccagtgctgaagccacttcacgatgccgctggtcttgtaaagcttcacgtttcctcttaccaggctgtttccggttctggtcttgcaggtgtggaaaccttggcaaagcaggttgctgcagttggagaccacaacgttgagttcgtccatgatggacaggctgctgacgcaggcgatgtcggaccttatgtttcaccaatcgcttacaacgtgctgccattcgccggaaacctcgtcgatgacggcaccttcgaaaccgatgaagagcagaagctgcgcaacgaatcccgcaagattctcggtctcccagacctcaaggtctcaggcacctgcgtccgcgtgccggttttcaccggccacacgctgaccattcacgccgaattcgacaaggcaatcaccgtggaccaggcgcaggagatcttgggtgccgcttcaggcgtcaagcttgtcgacgtcccaaccccacttgcagctgccggcattgacgaatccctcgttggacgcatccgtcaggactccactgtcgacgataaccgcggtctggttctcgtcgtatctggcgacaacctccgcaagggtgctgcgctaaacaccatccagatcgctgagctgctggttaag

SEQ ID NO: 104 - protein, 344 aa, Corynebacterium glutamicum
MTTIAVVGATGQVGQVMRTLLEERNFPADTVRFFASPRSAGRKIEFRGTEIEVEDITQATEESLKDIDVALFSAGGTASKQYAPLFAAAGATVVDNSSAWRKDDEVPLIVSEVNPSDKDSLVKGIIANPNCTTMAAMPVLKPLHDAAGLVKLHVSSYQAVSGSGLAGVETLAKQVAAVGDHNVEFVHDGQAADAGDVGPYVSPIAYNVLPFAGNLVDDGTFETDEEQKLRNESRKILGLPDLKVSGTCVRVPVFTGHTLTIHAEFDKAITVDQAQEILGAASGVKLVDVPTPLAAAGIDESLVGRIRQDSTVDDNRGLVLVVSGDNLRKGAALNTIQIAELLVK

SEQ ID NO: 105 - DNA, 882 bp, Corynebacterium glutamicum
  CDS (1)..(882): RXA00782W
atgtctatttttctcaattcagattcccgcatcatcattcagggcattaccggttcggaaggttcagagcatgcgcgtcgaattttagcctctggtgcgaagctcgtgggtggcaccaacccccgcaaagctgggcaaaccattttgatcaatgacactgagttgcctgtatttggcactgttaaggaagcaatggaggaaacgggtgcggatgtcaccgtaattttcgttcctccagcctttgccaaagctgcgatcattgaagctatcgacgctcacatcccactgtgcgtgattattactgagggcatcccagtgcgtgacgcttctgaggcgtgggcttatgccaagaaggtgggacacacccgcatcattggccctaactgcccaggcattattactcccggcgaatctcttgcgggaattacgccggcaaacattgcaggttccggcccgatcgggttgatctcaaagtcgggaacactgacttatcagatgatgtacgaactttcagatattggcatttctacggcgattggtattggcggtgacccaatcatcggtacaacccatatcgacgctctggaggcctttgaagctgatcctgagaccaaggcaatcgtcatgatcggtgagatcggtggagatgcagaggaacgcgctgctgacttcatttctaagcacgtgacaaaaccagttgtgggttacgtggcaggctttaccgcccctgaaggaaagaccatggggcatgctggcgccatcgtgacaggttcagaaggcactgcgcgagcaaagaagcatgcattggaggccgtgggtgttcgcgtgggaacaactccgagtgaaaccgcgaagcttatgcgtgaggtagttgcagctttg

SEQ ID NO: 106 - protein, 294 aa, Corynebacterium glutamicum
MSIFLNSDSRIIIQGITGSEGSEHARRILASGAKLVGGTNPRKAGQTILINDTELPVFGTVKEAMEETGADVTVIFVPPAFAKAAIIEAIDAHIPLCVIITEGIPVRDASEAWAYAKKVGHTRIIGPNCPGIITPGESLAGITPANIAGSGPIGLISKSGTLTYQMMYELSDIGISTAIGIGGDPIIGTTHIDALEAFEADPETKAIVMIGEIGGDAEERAADFISKHVTKPVVGYVAGFTAPEGKTMGHAGAIVTGSEGTARAKKHALEAVGVRVGTTPSETAKLMREVVAAL

SEQ ID NO: 107 - DNA, 681 bp, Corynebacterium glutamicum
  CDS (1)..(681): RXA00822K
gtggaaggtgtacaggagatcctgtcgcgcgccggaatttttcaaggcgttgacccaacggcagtcaataacctcatccaggatatggagaccgttcgcttcccacgcggagcaaccatcttcgacgagggcgagccaggtgaccgcctttacatcatcacctccggcaaagtgaagcttgcgcgccacgcaccggacggccgcgaaaacctgctgaccatcatgggtccttccgacatgttcggtgagctctccatcttcgacccaggcccacgcacctcctctgcagtgtgtgtcaccgaagttcatgcagcaaccatgaactctgacatgctgcgcaactgggtagctgaccacccagctatcgctgagcagctcctgcgcgttctggctcgtcgtctgcgtcgcaccaacgcttccctggctgacctcatcttcaccgacgtcccaggccgcgttgctaagacccttctgcagctggctaaccgcttcggcacccaagaagctggcgcgctgcgcgtgaaccacgacctcactcaggaagaaatcgcacagctcgtcggtgcttcccgtgaaactgtgaataaggctcttgcaacgttcgcacaccgtggctggattcgcctcgagggcaagtccgtcctcattgtggacaccgagcatttggcacgtcgcgctcga

SEQ ID NO: 108 - protein, 227 aa, Corynebacterium glutamicum
MEGVQEILSRAGIFQGVDPTAVNNLIQDMETVRFPRGATIFDEGEPGDRLYIITSGKVKLARHAPDGRENLLTIMGPSDMFGELSIFDPGPRTSSAVCVTEVHAATMNSDMLRNWVADHPAIAEQLLRVLARRLRRTNASLADLIFTDVPGRVAKTLLQLANRFGTQEAGALRVNHDLTQEEIAQLVGASRETVNKALATFAHRGWIRLEGKSVLIVDTEHLARRAR

SEQ ID NO: 109 - DNA, 1650 bp, Corynebacterium glutamicum
  CDS (1)..(1650): RXA00975K
atgacaccagctgatctcgcaacattgattaaagagaccgcggtagaggttttgacctcccgcgagctcgatacttctgttcttccggagcaggtagttgtggagcgtccgcgtaacccagagcacggcgattacgccaccaacattgcattgcaggtggctaaaaaggtcggtcagaaccctcgggatttggctacctggctggcagaggcattggctgcagatgacgccattgattctgctgaaattgctggcccaggctttttgaacattcgccttgctgcagcagcacagggtgaaattgtggccaagattctggcacagggcgagactttcggaaactccgatcacctttcccacttggacgtgaacctcgagttcgtttctgcaaacccaaccggacctattcaccttggcggaacccgctgggctgccgtgggtgactctttgggtcgtgtgctggaggcttccggcgcgaaagtgacccgcgaatactacttcaacgatcacggtcgccagatcgatcgtttcgctttgtcccttcttgcagcggcgaagggcgagccaacgccagaagacggttatggcggcgaatacattaaggaaattgcggaggcaatcgtcgaaaagcatcctgaagcgttggctttggagcctgccgcaacccaggagcttttccgcgctgaaggcgtggagatgatgttcgagcacatcaaatcttccctgcatgagttcggcaccgatttcgatgtctactaccacgagaactccctgttcgagtccggtgcggtggacaaggccgtgcaggtgctgaaggacaacggcaacctgtacgaaaacgagggcgcttggtggctgcgttccaccgaattcggcgatgacaaagaccgcgtggtgatcaagtctgacggcgacgcagcctacatcgctggcgatatcgcgtacgtggctgataagttctcccgcggacacaacctaaacatctacatgttgggtgctgaccaccatggttacatcgcgcgcctgaaggcagcggcggcggcacttggctacaagccagaaggcgttgaagtcctgattggccagatggtgaacctgcttcgcgacggcaaggcagtgcgtatgtccaagcgtgcaggcaccgtggtcaccctagatgacctcgttgaagcaatcggcatcgatgcggcgcgttactccctgatccgttcctccgtggattcttccctggatatcgatctcggcctgtgggaatcccagtcctccgacaaccctgtgtactacgtgcagtacggacacgctcgtctgtgctccatcgcgcgcaaggcagagaccttgggtgtcaccgaggaaggcgcagacctatctctactgacccacgaccgcgaaggcgatctcatccgcacactcggagagttcccagcagtggtgaaggctgccgctgacctacgtgaaccacaccgcattgcccgctatgctgaggaattagctggaactttccaccgcttctacgattcctgccacatccttccaaaggttgatgaggatacggcaccaatccacacagcacgtctggcacttgcagcagcaacccgccagaccctcgctaacgccctgcacctggttggcgtttccgcaccggagaagatg

SEQ ID NO: 110 - protein, 550 aa, Corynebacterium glutamicum
MTPADLATLIKETAVEVLTSRELDTSVLPEQVVVERPRNPEHGDYATNIALQVAKKVGQNPRDLATWLAEALAADDAIDSAEIAGPGFLNIRLAAAAQGEIVAKILAQGETFGNSDHLSHLDVNLEFVSANPTGPIHLGGTRWAAVGDSLGRVLEASGAKVTREYYFNDHGRQIDRFALSLLAAAKGEPTPEDGYGGEYIKEIAEAIVEKHPEALALEPAATQELFRAEGVEMMFEHIKSSLHEFGTDFDVYYHENSLFESGAVDKAVQVLKDNGNLYENEGAWWLRSTEFGDDKDRVVIKSDGDAAYIAGDIAYVADKFSRGHNLNIYMLGADHHGYIARLKAAAAALGYKPEGVEVLIGQMVNLLRDGKAVRMSKRAGTVVTLDDLVEAIGIDAARYSLIRSSVDSSLDIDLGLWESQSSDNPVYYVQYGHARLCSIARKAETLGVTEEGADLSLLTHDREGDLIRTLGEFPAVVKAAADLREPHRIARYAEELAGTFHRFYDSCHILPKVDEDTAPIHTARLALAAATRQTLANALHLVGVSAPEKM

SEQ ID NO: 111 - DNA, 750 bp, Corynebacterium glutamicum
  CDS (1)..(747): RXA01311E
atgaaacttacacttgagatctggcgtcaagcaggcccaactgcggaaggcaagttcgaaaccgtccaggttgacgacgccgtcgcgcagatgtccatcctggagctgcttgaccacgtaaacaacaagttcatcgaagaaggcaaagaaccattcgcgttcgcctctgactgccgcgaaggcatttgtggtacctgtggtctcctcgtgaacggtcgccctcacggcgccgaccagaacaagcctgcctgtgcgcagcgcctggtcagctacaaggaaggcgacaccctcaagatcgaaccactgcgttccgccgcatacccagtgatcaaggacatggtcgtcgaccgctccgcactggaccgtgtcatggaacagggtggctacgtgaccatcaacgcaggtaccgcacctgacgctgataccctccacgtcaaccacgaaaccgcagaactcgcacttgaccacgcagcctgcatcggctgtggcgcatgtgttgctgcctgccctaacggcgcagcacacctgttcaccggcgcaaagcttgttcacctctccctcctcccactgggtaaggaagagcgcggactgcgtgcacgtaagatggttgatgaaatggaaaccaacttcggacactgctccctctacggcgagtgcgcagatgtctgccccgcaggcatcccactgaccgctgtggcagctgtcaccaaggaacgtgcgcgtgcagctttccgaggcaaagacgactag

SEQ ID NO: 112 - protein, 249 aa, Corynebacterium glutamicum
MKLTLEIWRQAGPTAEGKFETVQVDDAVAQMSILELLDHVNNKFIEEGKEPFAFASDCREGICGTCGLLVNGRPHGADQNKPACAQRLVSYKEGDTLKIEPLRSAAYPVIKDMVVDRSALDRVMEQGGYVTINAGTAPDADTLHVNHETAELALDHAACIGCGACVAACPNGAAHLFTGAKLVHLSLLPLGKEERGLRARKMVDEMETNFGHCSLYGECADVCPAGIPLTAVAAVTKERARAAFRGKDD

SEQ ID NO: 113 - DNA, 837 bp, Corynebacterium glutamicum
  CDS (1)..(837): RXA01311K
atgggaaccaggcgagaacggaaccttcgtccgccacgcagaaccactgttcttcgaatccgtcccactgcagacaaggaactacaagtaatgaaacttacacttgagatctggcgtcaagcaggcccaactgcggaaggcaagttcgaaaccgtccaggttgacgacgccgtcgcgcagatgtccatcctggagctgcttgaccacgtaaacaacaagttcatcgaagaaggcaaagaaccattcgcgttcgcctctgactgccgcgaaggcatttgtggtacctgtggtctcctcgtgaacggtcgccctcacggcgccgaccagaacaagcctgcctgtgcgcagcgcctggtcagctacaaggaaggcgacaccctcaagatcgaaccactgcgttccgccgcatacccagtgatcaaggacatggtcgtcgaccgctccgcactggaccgtgtcatggaacagggtggctacgtgaccatcaacgcaggtaccgcacctgacgctgataccctccacgtcaaccacgaaaccgcagaactcgcacttgaccacgcagcctgcatcggctgtggcgcatgtgttgctgcctgccctaacggcgcagcacacctgttcaccggcgcaaagcttgttcacctctccctcctcccactgggtaaggaagagcgcggactgcgtgcacgtaagatggttgatgaaatggaaaccaacttcggacactgctccctctacggcgagtgcgcagatgtctgccccgcaggcatcccactgaccgctgtggcagctgtcaccaaggaacgtgcgcgtgcagctttccgaggcaaagacgac

SEQ ID NO: 114 - protein, 279 aa, Corynebacterium glutamicum
MGTRRERNLRPPRRTTVLRIRPTADKELQVMKLTLEIWRQAGPTAEGKFETVQVDDAVAQMSILELLDHVNNKFIEEGKEPFAFASDCREGICGTCGLLVNGRPHGADQNKPACAQRLVSYKEGDTLKIEPLRSAAYPVIKDMVVDRSALDRVMEQGGYVTINAGTAPDADTLHVNHETAELALDHAACIGCGACVAACPNGAAHLFTGAKLVHLSLLPLGKEERGLRARKMVDEMETNFGHCSLYGECADVCPAGIPLTAVAAVTKERARAAFRGKDD

SEQ ID NO: 115 - DNA, 2019 bp, Corynebacterium glutamicum
  CDS (1)..(2019): RXA01312E
atgagcactcactctgaaaccacccgcccagagttcatccacccagtctcagtcctcccagaggtctcagctggtacggtccttgacgctgcagagccagcaggcgttcccaccaaagatatgtgggaataccaaaaagaccacatgaacctggtctccccactgaaccgacgcaagttccgtgtcctcgtcgttggcaccggcctgtccggtggtgctgcagcagcagccctcggcgaactcggatacgacgtcaaggcgttcacctaccacgacgcacctcgccgtgcgcactccattgctgcacagggtggcgttaactccgcccgcggcaagaaggtagacaacgacggcgcataccgccacgtcaaggacaccgtcaagggcggcgactaccgtggtcgcgagtccgactgctggcgtctcgccgtcgagtccgtccgcgtcatcgaccacatgaacgccatcggtgcaccattcgcccgcgaatacggtggcgccttggcaacccgttccttcggtggtgtgcaggtctcccgtacctactacacccgtggacaaaccggacagcagctgcagctctccaccgcatccgcactacagcgccagatccacctcggctccgtagaaatcttcacccataacgaaatggttgacgtcattgtcaccgaacgtaacggtgaaaagcgctgcgaaggcctgatcatgcgcaacctgatcaccggcgagctcaccgcacacaccggccatgccgttatcctggcaaccggtggctacggcaacgtgtaccacatgtccaccctggccaagaactccaacgcctcggccatcatgcgtgcatacgaagccggcgcatacttcgcgtccccatcgttcatccagttccacccaaccggcctgcctgtgaactccacctggcagtccaagaccattctgatgtccgagtcgctgcgtaacgacggccgcatctggtcccctaaggaaccgaacgataaccgcgatccaaacaccatccctgaggatgagcgcgactacttcctggagcgccgctacccagcattcggtaacctcgtcccacgtgacgttgcttcccgtgcgatctcccagcagatcaatgctggtctcggtgttggacctctgaacaacgctgcatacctggacttccgcgacgccaccgagcgcctcggacaggacaccatccgcgagcgttactccaacctcttcaccatgtacgaagaggcaattggcgaggacccatactccagcccaatgcgtattgcaccgacctgccacttcaccatgggtggcctctggactgacttcaacgaaatgacgtcactcccaggtctgttctgcgcaggcgaagcatcctggacctaccacggtgcaaaccgtctgggcgcaaactccctgctctccgcttccgtcgatggctggttcaccctgccattcaccatccctaactacctcggcccattgcttggctccgagcgtctgtcagaggatgcaccagaagcacaggcagcgattgcgcgtgcacaggctcgcattgaccgcctcatgggcaaccgcccagagtgggtcggtgacaacgttcacggacctgagtactaccaccgccagcttggcgatatcctgtacttctcctgtggcgtttcccgaaacgtagaagacctccaggatggcatcaacaagatccgtgccctccgcgatgacttctggaagaacatgcgcatcaccggcagcaccgatgagatgaaccaggttctcgaatacgcagcacgcgtagccgactacatcgacctcggcgaactcatgtgtgtcgacgccctcgaccgcgacgagtcctgtggcgctcacttccgcgacgaccacctctccgaagatggcgaagcagaacgtgacgacgaaaactggtgcttcgtctccgcatgggaaccaggcgagaacggaaccttcgtccgccacgcagaaccactgttcttcgaatccgtcccactgcagacaaggaactacaag

SEQ ID NO: 116 - protein, 673 aa, Corynebacterium glutamicum
MSTHSETTRPEFIHPVSVLPEVSAGTVLDAAEPAGVPTKDMWEYQKDHMNLVSPLNRRKFRVLVVGTGLSGGAAAAALGELGYDVKAFTYHDAPRRAHSIAAQGGVNSARGKKVDNDGAYRHVKDTVKGGDYRGRESDCWRLAVESVRVIDHMNAIGAPFAREYGGALATRSFGGVQVSRTYYTRGQTGQQLQLSTASALQRQIHLGSVEIFTHNEMVDVIVTERNGEKRCEGLIMRNLITGELTAHTGHAVILATGGYGNVYHMSTLAKNSNASAIMRAYEAGAYFASPSFIQFHPTGLPVNSTWQSKTILMSESLRNDGRIWSPKEPNDNRDPNTIPEDERDYFLERRYPAFGNLVPRDVASRAISQQINAGLGVGPLNNAAYLDFRDATERLGQDTIRERYSNLFTMYEEAIGEDPYSSPMRIAPTCHFTMGGLWTDFNEMTSLPGLFCAGEASWTYHGANRLGANSLLSASVDGWFTLPFTIPNYLGPLLGSERLSEDAPEAQAAIARAQARIDRLMGNRPEWVGDNVHGPEYYHRQLGDILYFSCGVSRNVEDLQDGINKIRALRDDFWKNMRITGSTDEMNQVLEYAARVADYIDLGELMCVDALDRDESCGAHFRDDHLSEDGEAERDDENWCFVSAWEPGENGTFVRHAEPLFFESVPLQTRNYK

SEQ ID NO: 117 - DNA, 1875 bp, Corynebacterium glutamicum
  CDS (1)..(1875): RXA01312K
atgaacctggtctccccactgaaccgacgcaagttccgtgtcctcgtcgttggcaccggcctgtccggtggtgctgcagcagcagccctcggcgaactcggatacgacgtcaaggcgttcacctaccacgacgcacctcgccgtgcgcactccattgctgcacagggtggcgttaactccgcccgcggcaagaaggtagacaacgacggcgcataccgccacgtcaaggacaccgtcaagggcggcgactaccgtggtcgcgagtccgactgctggcgtctcgccgtcgagtccgtccgcgtcatcgaccacatgaacgccatcggtgcaccattcgcccgcgaatacggtggcgccttggcaacccgttccttcggtggtgtgcaggtctcccgtacctactacacccgtggacaaaccggacagcagctgcagctctccaccgcatccgcactacagcgccagatccacctcggctccgtagaaatcttcacccataacgaaatggttgacgtcattgtcaccgaacgtaacggtgaaaagcgctgcgaaggcctgatcatgcgcaacctgatcaccggcgagctcaccgcacacaccggccatgccgttatcctggcaaccggtggctacggcaacgtgtaccacatgtccaccctggccaagaactccaacgcctcggccatcatgcgtgcatacgaagccggcgcatacttcgcgtccccatcgttcatccagttccacccaaccggcctgcctgtgaactccacctggcagtccaagaccattctgatgtccgagtcgctgcgtaacgacggccgcatctggtcccctaaggaaccgaacgataaccgcgatccaaacaccatccctgaggatgagcgcgactacttcctggagcgccgctacccagcattcggtaacctcgtcccacgtgacgttgcttcccgtgcgatctcccagcagatcaatgctggtctcggtgttggacctctgaacaacgctgcatacctggacttccgcgacgccaccgagcgcctcggacaggacaccatccgcgagcgttactccaacctcttcaccatgtacgaagaggcaattggcgaggacccatactccagcccaatgcgtattgcaccgacctgccacttcaccatgggtggcctctggactgacttcaacgaaatgacgtcactcccaggtctgttctgcgcaggcgaagcatcctggacctaccacggtgcaaaccgtctgggcgcaaactccctgctctccgcttccgtcgatggctggttcaccctgccattcaccatccctaactacctcggcccattgcttggctccgagcgtctgtcagaggatgcaccagaagcacaggcagcgattgcgcgtgcacaggctcgcattgaccgcctcatgggcaaccgcccagagtgggtcggtgacaacgttcacggacctgagtactaccaccgccagcttggcgatatcctgtacttctcctgtggcgtttcccgaaacgtagaagacctccaggatggcatcaacaagatccgtgccctccgcgatgacttctggaagaacatgcgcatcaccggcagcaccgatgagatgaaccaggttctcgaatacgcagcacgcgtagccgactacatcgacctcggcgaactcatgtgtgtcgacgccctcgaccgcgacgagtcctgtggcgctcacttccgcgacgaccacctctccgaagatggcgaagcagaacgtgacgacgaaaactggtgcttcgtctccgcatgggaaccaggcgagaacggaaccttcgtccgccacgcagaaccactgttcttcgaatccgtcccactgcagacaaggaactacaag

SEQ ID NO: 118 - protein, 625 aa, Corynebacterium glutamicum
MNLVSPLNRRKFRVLVVGTGLSGGAAAAALGELGYDVKAFTYHDAPRRAHSIAAQGGVNSARGKKVDNDGAYRHVKDTVKGGDYRGRESDCWRLAVESVRVIDHMNAIGAPFAREYGGALATRSFGGVQVSRTYYTRGQTGQQLQLSTASALQRQIHLGSVEIFTHNEMVDVIVTERNGEKRCEGLIMRNLITGELTAHTGHAVILATGGYGNVYHMSTLAKNSNASAIMRAYEAGAYFASPSFIQFHPTGLPVNSTWQSKTILMSESLRNDGRIWSPKEPNDNRDPNTIPEDERDYFLERRYPAFGNLVPRDVASRAISQQINAGLGVGPLNNAAYLDFRDATERLGQDTIRERYSNLFTMYEEAIGEDPYSSPMRIAPTCHFTMGGLWTDFNEMTSLPGLFCAGEASWTYHGANRLGANSLLSASVDGWFTLPFTIPNYLGPLLGSERLSEDAPEAQAAIARAQARIDRLMGNRPEWVGDNVHGPEYYHRQLGDILYFSCGVSRNVEDLQDGINKIRALRDDFWKNMRITGSTDEMNQVLEYAARVADYIDLGELMCVDALDRDESCGAHFRDDHLSEDGEAERDDENWCFVSAWEPGENGTFVRHAEPLFFESVPLQTRNYK

SEQ ID NO: 119 - DNA, 1107 bp, Corynebacterium glutamicum
  CDS (1)..(1107): RXA01350E
ttggggcaattcgggggtaattttgcagtatcgtcaagatcacccaaaactggtggctgttctcttttaagcgggatagcatgggttcttagaggaccccctacaaggattgaggattgtttaatgaattccccgcagaacgtctccaccaagaaggtcaccgtcaccggcgcagctggtcaaatctcttattcactgttgtggcgcatcgccaacggtgaagtattcggcaccgacacccctgtagaactgaaacttctggagatccctcaggctcttggcggggcagagggtgtggctatggaacttctggattctgccttccccctcctgcgaaacatcaccatcaccgcggatgccaatgaggcattcgacggcgctaatgcggcgtttttggtcggtgcgaagcctcgcggaaaaggcgaagagcgcgcagatttgctggctaacaacggcaagattttcggacctcaaggtaaagctatcaatgacaacgccgcagatgacattcgtgtcctagttgttggaaacccagcgaacaccaacgcgttgattgcttcagctgcggccccagatgttccagcatcccgcttcaacgcaatgatgcgccttgatcacaaccgtgcgatctcccagctggccaccaagcttggccgtggatctgcggaatttaacaacattgtggtctggggaaatcactccgcaacccagttcccagacatcacctacgcaaccgttggtggagaaaaggtcactgacctggttgatcacgattggtatgtggaggagttcattcctcgcgtggctaaccgtggcgctgaaatcattgaggtccgtggaaagtcttctgcagcttctgcagcatcctctgcgattgatcacatgcgcgattgggtacagggcaccgaggcgtggtcctctgcggcaattccttccaccggtgcatacggcattcctgagggcatttttgtcggtctgccaaccgtatcccgcaacggtgagtgggaaatcgttgaaggcctggagatttccgatttccagcgcgcccgcatcgacgcgaatgctcaggaattgcaggccgagcgcgaggcagtgcgcgacttgctc

SEQ ID NO: 120 - protein, 369 aa, Corynebacterium glutamicum
MGQFGGNFAVSSRSPKTGGCSLLSGIAWVLRGPPTRIEDCLMNSPQNVSTKKVTVTGAAGQISYSLLWRIANGEVFGTDTPVELKLLEIPQALGGAEGVAMELLDSAFPLLRNITITADANEAFDGANAAFLVGAKPRGKGEERADLLANNGKIFGPQGKAINDNAADDIRVLVVGNPANTNALIASAAAPDVPASRFNAMMRLDHNRAISQLATKLGRGSAEFNNIVVWGNHSATQFPDITYATVGGEKVTDLVDHDWYVEEFIPRVANRGAEIIEVRGKSSAASAASSAIDHMRDWVQGTEAWSSAAIPSTGAYGIPEGIFVGLPTVSRNGEWEIVEGLEISDFQRARIDANAQELQAEREAVRDLL

SEQ ID NO: 121 - DNA, 984 bp, Corynebacterium glutamicum
  CDS (1)..(984): RXA01350W
atgaattccccgcagaacgtctccaccaagaaggtcaccgtcaccggcgcagctggtcaaatctcttattcactgttgtggcgcatcgccaacggtgaagtattcggcaccgacacccctgtagaactgaaacttctggagatccctcaggctcttggcggggcagagggtgtggctatggaacttctggattctgccttccccctcctgcgaaacatcaccatcaccgcggatgccaatgaggcattcgacggcgctaatgcggcgtttttggtcggtgcgaagcctcgcggaaaaggcgaagagcgcgcagatttgctggctaacaacggcaagattttcggacctcaaggtaaagctatcaatgacaacgccgcagatgacattcgtgtcctagttgttggaaacccagcgaacaccaacgcgttgattgcttcagctgcggccccagatgttccagcatcccgcttcaacgcaatgatgcgccttgatcacaaccgtgcgatctcccagctggccaccaagcttggccgtggatctgcggaatttaacaacattgtggtctggggaaatcactccgcaacccagttcccagacatcacctacgcaaccgttggtggagaaaaggtcactgacctggttgatcacgattggtatgtggaggagttcattcctcgcgtggctaaccgtggcgctgaaatcattgaggtccgtggaaagtcttctgcagcttctgcagcatcctctgcgattgatcacatgcgcgattgggtacagggcaccgaggcgtggtcctctgcggcaattccttccaccggtgcatacggcattcctgagggcatttttgtcggtctgccaaccgtatcccgcaacggtgagtgggaaatcgttgaaggcctggagatttccgatttccagcgcgcccgcatcgacgcgaatgctcaggaattgcaggccgagcgcgaggcagtgcgcgacttgctc

SEQ ID NO: 122 - protein, 328 aa, Corynebacterium glutamicum
MNSPQNVSTKKVTVTGAAGQISYSLLWRIANGEVFGTDTPVELKLLEIPQALGGAEGVAMELLDSAFPLLRNITITADANEAFDGANAAFLVGAKPRGKGEERADLLANNGKIFGPQGKAINDNAADDIRVLVVGNPANTNALIASAAAPDVPASRFNAMMRLDHNRAISQLATKLGRGSAEFNNIVVWGNHSATQFPDITYATVGGEKVTDLVDHDWYVEEFIPRVANRGAEIIEVRGKSSAASAASSAIDHMRDWVQGTEAWSSAAIPSTGAYGIPEGIFVGLPTVSRNGEWEIVEGLEISDFQRARIDANAQELQAEREAVRDLL

SEQ ID NO: 123 - DNA, 870 bp, Corynebacterium glutamicum
  CDS (1)..(870): RXA01393W
atgaaccccattcaactggacactttgctctcaatcattgatgaaggcagcttcgaaggcgcctccttagccctttccatttccccctcggcggtgagtcagcgcgttaaagctctcgagcatcacgtgggtcgagtgttggtatcgcgcacccaaccggccaaagcaaccgaagcgggtgaagtccttgtgcaagcagcgcggaaaatggtgttgctgcaagcagaaactaaagcgcaactatctggacgccttgctgaaatcccgttaaccatcgccatcaacgcagattcgctatccacatggtttcctcccgtgttcaacgaggtagcttcttggggtggagcaacgctcacgctgcgcttggaagatgaagcgcacacattatccttgctgcggcgtggagatgttttaggagcggtaacccgtgaagctaatcccgtggcgggatgtgaagtagtagaacttggaaccatgcgccacttggccattgcaaccccctcattgcgggatgcctacatggttgatgggaaactagattgggctgcgatgcccgtcttacgcttcggtcccaaagatgtgcttcaagaccgtgacctggacgggcgcgtcgatggtcctgtggggcgcaggcgcgtatccattgtcccgtcggcggaaggttttggtgaggcaattcgccgaggccttggttggggacttcttcccgaaacccaagctgctcccatgctaaaagcaggagaagtgatcctcctcgatgagatacccattgacacaccgatgtattggcaacgatggcgcctggaatctagatctctagctagactcacagacgccgtcgttgatgcagcaatcgagggattgcggcct

SEQ ID NO: 124 - protein, 290 aa, Corynebacterium glutamicum
MNPIQLDTLLSIIDEGSFEGASLALSISPSAVSQRVKALEHHVGRVLVSRTQPAKATEAGEVLVQAARKMVLLQAETKAQLSGRLAEIPLTIAINADSLSTWFPPVFNEVASWGGATLTLRLEDEAHTLSLLRRGDVLGAVTREANPVAGCEVVELGTMRHLAIATPSLRDAYMVDGKLDWAAMPVLRFGPKDVLQDRDLDGRVDGPVGRRRVSIVPSAEGFGEAIRRGLGWGLLPETQAAPMLKAGEVILLDEIPIDTPMYWQRWRLESRSLARLTDAVVDAAIEGLRP

SEQ ID NO: 125 - DNA, 948 bp, Corynebacterium glutamicum
  CDS (1)..(948): RXA02021W
atgagtgaaaacattcgcggagcccaagcagttggaatcgcaaatatcgccatggacgggaccatcctggacacgtggtacccagaaccccaaattttcaacccggatcagtgggctgaacgctacccattggaagtgggcaccacacgcctcggagcaaacgaactcaccccacggatgctgcagttggtaaaactggaccaagatcgcctcgtcgaacaggtagcagtccgcaccgttatccccgatctgtctcaacctccagtagacgcgcacgatgtttacctgcgcctccacctgctttcccaccggctggtccgcccccacgaaatgcacatgcaaaacaccttggagctgctgtccgacgtggtgtggacaaacaagggcccttgccttcctgaaaactttgagtgggtgcgtggtgctctgcggtcccgcggactcatccacgtctactgtgtggaccgtcttccccgcatggtcgactatgtggttccccctggagtccgcatctccgaagcagaacgcgtgcgcctaggtgcataccttgctccgggtacctctgtgctgcgtgaaggtttcgtgtctttcaactccggcaccttgggtgccgcaaaggtggaaggccgcctgagttccggtgtggtcatcggtgaaggttccgagattggactgtcttctactattcagtccccgagagatgaacagcgccgccgtttgccgttgagcatcggccaaaactgcaactttggtgtcagctccggaatcatcggagtcagtctgggagacaattgcgacatcggaaataacattgtcttggatggagatacccccatttggttcgcagccgatgaggagttacgcactatcgactccatcgaaggccaagcaaattggtcaatcaagcgtgaatccggcttccatgagccagttgcccgcctcaaagct

SEQ ID NO: 126 - protein, 316 aa, Corynebacterium glutamicum
MSENIRGAQAVGIANIAMDGTILDTWYPEPQIFNPDQWAERYPLEVGTTRLGANELTPRMLQLVKLDQDRLVEQVAVRTVIPDLSQPPVDAHDVYLRLHLLSHRLVRPHEMHMQNTLELLSDVVWTNKGPCLPENFEWVRGALRSRGLIHVYCVDRLPRMVDYVVPPGVRISEAERVRLGAYLAPGTSVLREGFVSFNSGTLGAAKVEGRLSSGVVIGEGSEIGLSSTIQSPRDEQRRRLPLSIGQNCNFGVSSGIIGVSLGDNCDIGNNIVLDGDTPIWFAADEELRTIDSIEGQANWSIKRESGFHEPVARLKA

SEQ ID NO: 127 - DNA, 1188 bp, Corynebacterium glutamicum
  CDS (1)..(1188): RXA02022E
ttgggctccgcgaatgttttcactcattttttaatcgaccgcttccatcatgttttaactaaggtttgtaggcttaaacctgtgaactctgaactcaaaccaggattagatctcctcggcgacccaattgtccttactcaacgtttggtagatataccgagtccgtcgggtcaggaaaagcagattgctgatgaaattgaagatgcccttcggaaccttaatctacctggtgtagaggtcttccgcttcaacaacaacgttcttgctcgcacgaacaggggattggcctcgagggtcatgcttgctggtcatatcgatacagtgccgatcgcggacaatctgccaagccgtgtggaagacggcatcatgtatggctgtggcaccgtcgatatgaaatctgggttggcggtgtatttgcatacttttgccaccttggccacgtcgactgagcttaaacatgatctgacgctgattgcgtatgagtgcgaggaagttgctgatcacctcaatggtttgggccacattcgcgatgagcatccggagtggttggcggctgatttggcgttgttgggtgagcctactggcggctggattgaggcgggctgccagggcaatctgcgcatcaaggtgacggcgcatggtgtgcgtgcccattcggcgagaagctggttgggtgataatgcgatgcataagttgtcgccgatcatttcgaaggttgctgcgtataaggccgcagaagtcaacattgatggcttgacctaccgtgaaggcctcaacatcgttttctgcgaatcgggcgtggcaaacaacgtcattccagacctcgcgtggatgaacctcaacttccgtttcgcgccgaatcgcgatctcaacgaggcgatcgagcatgtcgtcgaaacgcttgagcttgacggtcaagacggcatcgaatgggccgtagaagacggggcaggcggtgcccttccaggcttggggcagcaggtgacaagcgggcttatcgacgccgtcggccgcgaaaaaatccgcgcaaaattcggctggaccgatgtctcacgtttttcagccatgggaattccagccctaaactttggcgctggtgatccaagtttcgcgcataaacgcgacgagcagtgcccagtggagcaaatcacggatgtggcagcaattttgaagcagtacctgagcgag

SEQ ID NO: 128 - protein, 396 aa, Corynebacterium glutamicum
MGSANVFTHFLIDRFHHVLTKVCRLKPVNSELKPGLDLLGDPIVLTQRLVDIPSPSGQEKQIADEIEDALRNLNLPGVEVFRFNNNVLARTNRGLASRVMLAGHIDTVPIADNLPSRVEDGIMYGCGTVDMKSGLAVYLHTFATLATSTELKHDLTLIAYECEEVADHLNGLGHIRDEHPEWLAADLALLGEPTGGWIEAGCQGNLRIKVTAHGVRAHSARSWLGDNAMHKLSPIISKVAAYKAAEVNIDGLTYREGLNIVFCESGVANNVIPDLAWMNLNFRFAPNRDLNEAIEHVVETLELDGQDGIEWAVEDGAGGALPGLGQQVTSGLIDAVGREKIRAKFGWTDVSRFSAMGIPALNFGAGDPSFAHKRDEQCPVEQITDVAAILKQYLSE

SEQ ID NO: 129 - DNA, 1107 bp, Corynebacterium glutamicum
  CDS (1)..(1107): RXA02022K
gtgaactctgaactcaaaccaggattagatctcctcggcgacccaattgtccttactcaacgtttggtagatataccgagtccgtcgggtcaggaaaagcagattgctgatgaaattgaagatgcccttcggaaccttaatctacctggtgtagaggtcttccgcttcaacaacaacgttcttgctcgcacgaacaggggattggcctcgagggtcatgcttgctggtcatatcgatacagtgccgatcgcggacaatctgccaagccgtgtggaagacggcatcatgtatggctgtggcaccgtcgatatgaaatctgggttggcggtgtatttgcatacttttgccaccttggccacgtcgactgagcttaaacatgatctgacgctgattgcgtatgagtgcgaggaagttgctgatcacctcaatggtttgggccacattcgcgatgagcatccggagtggttggcggctgatttggcgttgttgggtgagcctactggcggctggattgaggcgggctgccagggcaatctgcgcatcaaggtgacggcgcatggtgtgcgtgcccattcggcgagaagctggttgggtgataatgcgatgcataagttgtcgccgatcatttcgaaggttgctgcgtataaggccgcagaagtcaacattgatggcttgacctaccgtgaaggcctcaacatcgttttctgcgaatcgggcgtggcaaacaacgtcattccagacctcgcgtggatgaacctcaacttccgtttcgcgccgaatcgcgatctcaacgaggcgatcgagcatgtcgtcgaaacgcttgagcttgacggtcaagacggcatcgaatgggccgtagaagacggggcaggcggtgcccttccaggcttggggcagcaggtgacaagcgggcttatcgacgccgtcggccgcgaaaaaatccgcgcaaaattcggctggaccgatgtctcacgtttttcagccatgggaattccagccctaaactttggcgctggtgatccaagtttcgcgcataaacgcgacgagcagtgcccagtggagcaaatcacggatgtggcagcaattttgaagcagtacctgagcgag

SEQ ID NO: 130 - protein, 369 aa, Corynebacterium glutamicum
MNSELKPGLDLLGDPIVLTQRLVDIPSPSGQEKQIADEIEDALRNLNLPGVEVFRFNNNVLARTNRGLASRVMLAGHIDTVPIADNLPSRVEDGIMYGCGTVDMKSGLAVYLHTFATLATSTELKHDLTLIAYECEEVADHLNGLGHIRDEHPEWLAADLALLGEPTGGWIEAGCQGNLRIKVTAHGVRAHSARSWLGDNAMHKLSPIISKVAAYKAAEVNIDGLTYREGLNIVFCESGVANNVIPDLAWMNLNFRFAPNRDLNEAIEHVVETLELDGQDGIEWAVEDGAGGALPGLGQQVTSGLIDAVGREKIRAKFGWTDVSRFSAMGIPALNFGAGDPSFAHKRDEQCPVEQITDVAAILKQYLSE

SEQ ID NO: 131 - DNA, 1920 bp, Corynebacterium glutamicum
  CDS (1)..(1920): RXA02139K
atgtgcggccttcttggcatattgactgcaaatgggaacgctgaagcattcgttcctgcactcgagcgggccttgccatgcatgcgccaccgtggtcctgacgatgccggcacttggcatgacgccgatgcagcgtttggattcaaccgcctctccatcattgatattgcacactcccaccaaccactgcgttggggacctgcggatgaacccgaccgctacgcaatgactttcaacggtgagatctacaactacgttgagctgcgtaaagagctctcggatttgggatatgcctttaatacttctggcgatggcgagccaattgttgtcggtttccaccactggggcgagtccgtggtcgagcatctccgcggaatgttcggcattgccatttgggatacaaaggaaaagtcgcttttccttgcgcgtgatcagttcggcattaagccactgttctacgcaaccaccgagcatggcaccgtgttctcctcagagaagaagaccatcttggagatggccgaggagatgaatctagatctgggccttgataagcgcaccattgagcactacgtggacttgcagtacgtgcccgagccagatacccttcacgcgcagatttcccgcttggagtcaggctgcaccgcaacagttcgtccgggcggcaagctggaacagaagcgttacttcaagcctcagttcccagtacagaaggtcgtaaagggtaaggagcaggacctcttcgatcgcattgcccaggtgttggaggatagcgtcgaaaagcatatgcgtgccgacgtgaccgtaggctcgttcctttccggcggcattgactcaaccgcaattgcggcgcttgcaaagcgccacaaccctgacctgctcaccttcaccaccggtttcgagcgtgaaggctactcggaggtcgatgtggctgcggagtccgccgctgcgattggcgctgagcacatcgtgaagattgtctcgcctgaggaatacgccaacgcgattcctaagatcatgtggtacttggatgatcctgtagctgacccatcattggtcccgctgtacttcgtggcagcggaagcacgtaagcacgtcaaggttgtgctgtctggcgagggcgcagatgagctgttcggtggatacaccatttacaaggagccgctatcgcttgctccatttgagaagatcccttccccactacgtaaaggcctgggaaagctcagcaaggttctgccagacggcatgaagggcaagtcccttcttgagcgtggctccatgaccatggaagagcgctactacggcaacgctcgctccttcaatttcgagcagatgcaacgcgttattccatgggcaaagcgcgaatgggaccaccgcgaagtcactgcgccgatctacgcacagtcccgcaactttgatccagtagcccgcatgcaacacctggatctgttcacctggatgcgcggcgacatcctggtcaaggctgacaagatcaacatggcgaactcccttgagctgcgagttccattcttggataaggaagttttcaaggttgcagagaccattccttacgacctgaagattgccaacggtaccaccaagtacgcgctgcgcagggcactcgagcagattgttccgcctcacgttttgcaccgcaagaagctgggcttccctgttcccatgcgccactggcttgccggcgatgagctgttcggttgggcgcaggacaccatcaaggaatccggtactgaagatatcttcaacaagcaggctgtgctggatatgctgaacgagcaccgcgatggcgtgtcagatcattcccgtcgactgtggactgttctgtcatttatggtgtggcacggcatttttgtggaaaaccgcattgatccacagattgaggaccgctcctacccagtcgagctt

SEQ ID NO: 132 - protein, 640 aa, Corynebacterium glutamicum
MCGLLGILTANGNAEAFVPALERALPCMRHRGPDDAGTWHDADAAFGFNRLSIIDIAHSHQPLRWGPADEPDRYAMTFNGEIYNYVELRKELSDLGYAFNTSGDGEPIVVGFHHWGESVVEHLRGMFGIAIWDTKEKSLFLARDQFGIKPLFYATTEHGTVFSSEKKTILEMAEEMNLDLGLDKRTIEHYVDLQYVPEPDTLHAQISRLESGCTATVRPGGKLEQKRYFKPQFPVQKVVKGKEQDLFDRIAQVLEDSVEKHMRADVTVGSFLSGGIDSTAIAALAKRHNPDLLTFTTGFEREGYSEVDVAAESAAAIGAEHIVKIVSPEEYANAIPKIMWYLDDPVADPSLVPLYFVAAEARKHVKVVLSGEGADELFGGYTIYKEPLSLAPFEKIPSPLRKGLGKLSKVLPDGMKGKSLLERGSMTMEERYYGNARSFNFEQMQRVIPWAKREWDHREVTAPIYAQSRNFDPVARMQHLDLFTWMRGDILVKADKINMANSLELRVPFLDKEVFKVAETIPYDLKIANGTTKYALRRALEQIVPPHVLHRKKLGFPVPMRHWLAGDELFGWAQDTIKESGTEDIFNKQAVLDMLNEHRDGVSDHSRRLWTVLSFMVWHGIFVENRIDPQIEDRSYPVEL

SEQ ID NO: 133 - DNA, 1173 bp, Corynebacterium glutamicum
  CDS (1)..(1173): RXA02157W
atgagcacgctggaaacttggccacaggtcattattaatacgtacggcaccccaccagttgagctggtgtccggcaagggcgcaaccgtcactgatgaccagggcaatgtctacatcgacttgctcgcgggcatcgcagtcaacgcgttgggccacgcccacccggcgatcatcgaggcggtcaccaaccagatcggccaacttggtcacgtctcaaacttgttcgcatccaggcccgtcgtcgaggtcgccgaggagctcatcaagcgtttttcgcttgacgacgccaccctcgccgcgcaaacccgggttttcttctgcaactcgggcgccgaagcaaacgaggctgctttcaagattgcacgcttgactggtcgttcccggattctggctgcagttcatggtttccacggccgcaccatgggttccctcgcgctgactggccagccagacaagcgtgaagcgttcctgccaatgccaagcggtgtggagttctacccttacggcgacaccgattacttgcgcaaaatggtagaaaccaacccaacggatgtggctgctatcttcctcgagccaatccagggtgaaacgggcgttgttccagcacctgaaggattcctcaaggcagtgcgcgagctgtgcgatgagtacggcatcttgatgatcaccgatgaagtccagactggcgttggccgtaccggcgatttctttgcacatcagcacgatggcgttgttcccgatgtggtgaccatggccaagggacttggcggcggtcttcccatcggtgcttgtttggccactggccgtgcagctgaattgatgaccccaggcaagcacggcaccactttcggtggcaacccagttgcttgtgcagctgccaaggcagtgctgtctgttgtcgatgacgctttctgcgcagaagttgcccgcaagggcgagctgttcaaggaacttcttgccaaggttgacggcgttgtagacgtccgtggcaggggcttgatgttgggcgtggtgctggagcgcgacgtcgcaaagcaagctgttcttgatggttttaagcacggcgttattttgaatgcaccggcggacaacattatccgtttgaccccgccgctggtgatcaccgacgaagaaatcgcagacgcagtcaaggctattgccgagacaatcgca

SEQ ID NO: 134 - protein, 391 aa, Corynebacterium glutamicum
MSTLETWPQVIINTYGTPPVELVSGKGATVTDDQGNVYIDLLAGIAVNALGHAHPAIIEAVTNQIGQLGHVSNLFASRPVVEVAEELIKRFSLDDATLAAQTRVFFCNSGAEANEAAFKIARLTGRSRILAAVHGFHGRTMGSLALTGQPDKREAFLPMPSGVEFYPYGDTDYLRKMVETNPTDVAAIFLEPIQGETGVVPAPEGFLKAVRELCDEYGILMITDEVQTGVGRTGDFFAHQHDGVVPDVVTMAKGLGGGLPIGACLATGRAAELMTPGKHGTTFGGNPVACAAAKAVLSVVDDAFCAEVARKGELFKELLAKVDGVVDVRGRGLMLGVVLERDVAKQAVLDGFKHGVILNAPADNIIRLTPPLVITDEEIADAVKAIAETIA

SEQ ID NO: 135 - DNA, 831 bp, Corynebacterium glutamicum
  CDS (1)..(831): RXA02229K
gtgaatttgaccatcccctttgccaaaggccacgccaccgaaaacgacttcatcatcatccccgatgaggatgcgcgcctagatttaactccagaaatggtggtcacgctgtgtgaccgccgcgccgggatcggtgctgatggtatcctccgcgtggttaaagctgcagacgtagaaggctccacggtcgacccatcgctgtggttcatggattaccgcaacgccgatggatctttggctgaaatgtgcggcaatggtgtgcgcctgttcgcgcactggctgtactcccgcggtcttgttgataatacgagctttgatatcggtacccgcgccggtgtccgccacgttgatattttgcaggcagatcaacattctgcgcaggtccgcgttgatatgggcatccctgacgtcacgggattatccacctgcgacatcaacggccaagtattcgctggccttggcgttgatatgggtaacccacacctagcgtgcgttgtgccgggcttaagtgcgtcggctcttgccgatatggaactgcgcgcacctacgtttgatcaggaattcttcccccacggtgtgaacgtagaaatcgtcacagaattagaagatgacgcagtatcgatgcgcgtgtgggaacgcggagtgggcgaaacccgctcctgtggcacgggaaccgttgctgcagcgtgtgctgctttagctgatgctggattgggagaaggcacagttaaagtgtgcgttccaggtggggaagtagaagtccagatctttgacgacggctccacactcaccggcccaagcgccatcatcgcactcggtgaggtgcagatc

SEQ ID NO: 136 - protein, 277 aa, Corynebacterium glutamicum
MNLTIPFAKGHATENDFIIIPDEDARLDLTPEMVVTLCDRRAGIGADGILRVVKAADVEGSTVDPSLWFMDYRNADGSLAEMCGNGVRLFAHWLYSRGLVDNTSFDIGTRAGVRHVDILQADQHSAQVRVDMGIPDVTGLSTCDINGQVFAGLGVDMGNPHLACVVPGLSASALADMELRAPTFDQEFFPHGVNVEIVTELEDDAVSMRVWERGVGETRSCGTGTVAAACAALADAGLGEGTVKVCVPGGEVEVQIFDDGSTLTGPSAIIALGEVQI

SEQ ID NO: 137 - DNA, 2823 bp, Corynebacterium glutamicum
  CDS (1)..(2823): RXA02259E
ttgctgggtgattttttatctcatgcacgccaacaccctcaatgtgaaagagtgtttaaagtagttatgactgattttttacgcgatgacatcaggttcctcggtcaaatcctcggtgaggtaattgcggaacaagaaggccaggaggtttatgaactggtcgaacaagcgcgcctgacttcttttgatatcgccaagggcaacgccgaaatggatagcctggttcaggttttcgacggcattactccagccaaggcaacaccgattgctcgcgcattttcccacttcgctctgctggctaacctggcggaagacctctacgatgaagagcttcgtgaacaggctctcgatgcaggcgacacccctccggacagcactcttgatgccacctggctgaaactcaatgagggcaatgttggcgcagaagctgtggccgatgtgctgcgcaatgctgaggtggcgccggttctgactgcgcacccaactgagactcgccgccgcactgtttttgatgcgcaaaagtggatcaccacccacatgcgtgaacgccacgctttgcagtctgcggagcctaccgctcgtacgcaaagcaagttggatgagatcgagaagaacatccgccgtcgcatcaccattttgtggcagaccgcgttgattcgtgtggcccgcccacgtatcgaggacgagatcgaagtagggctgcgctactacaagctgagccttttggaagagattccacgtatcaaccgtgatgtggctgttgagcttcgtgagcgtttcggcgagggtgttcctttgaagcccgtggtcaagccaggttcctggattggtggagaccacgacggtaacccttatgtcaccgcggaaacagttgagtattccactcaccgcgctgcggaaaccgtgctcaagtactatgcacgccagctgcattccctcgagcatgagctcagcctgtcggaccgcatgaataaggtcaccccgcagctgcttgcgctggcagatgcagggcacaacgacgtgccaagccgcgtggatgagccttatcgacgcgccgtccatggcgttcgcggacgtatcctcgcgacgacggccgagctgatcggcgaggacgccgttgagggcgtgtggttcaaggtctttactccatacgcatctccggaagaattcttaaacgatgcgttgaccattgatcattctctgcgtgaatccaaggacgttctcattgccgatgatcgtttgtctgtgctgatttctgccatcgagagctttggattcaacctttacgcactggatctgcgccaaaactccgaaagctacgaggacgtcctcaccgagcttttcgaacgcgcccaagtcaccgcaaactaccgcgagctgtctgaagcagagaagcttgaggtgctgctgaaggaactgcgcagccctcgtccgctgatcccgcacggttcagatgaatacagcgaggtcaccgaccgcgagctcggcatcttccgcaccgcgtcggaggctgttaagaaattcgggccacggatggtgcctcactgcatcatctccatggcatcatcggtcaccgatgtgctcgagccgatggtgttgctcaaggaattcggactcatcgcagccaacggcgacaacccacgcggcaccgtcgatgtcatcccactgttcgaaaccatcgaagatctccaggccggcgccggaatcctcgacgaactgtggaaaattgatctctaccgcaactacctcctgcagcgcgacaacgtccaggaagtcatgctcggttactccgattccaacaaggatggcggatatttctccgcaaactgggcgctttacgacgcggaactgcagctcgtcgaactatgccgatcagccggggtcaagcttcgcctgttccacggccgtggtggcaccgtcggccgcggtggcggaccttcctacgacgcgattcttgcccagcccaggggggctgtccaaggttccgtgcgcatcaccgagcagggcgagatcatctccgctaagtacggcaaccccgaaaccgcgcgccgaaacctcgaagccctggtctcagccacgcttgaggcatcgcttctcgacgtctccgaactcaccgatcaccaacgcgcgtacgacatcatgagtgagatctctgagctcagcttgaagaagtacgcctccttggtgcacgaggatcaaggcttcatcgattacttcacccagtccacgccgctgcaggagattggatccctcaacatcggatccaggccttcctcacgcaagcagacctcctcggtggaagatttgcgagccatcccatgggtgctcagctggtcacagtctcgtgtcatgctgccaggctggtttggtgtcggaaccgcattagagcagtggattggcgaaggggagcaggccacccaacgcattgccgagctgcaaacactcaatgagtcctggccatttttcacctcagtgttggataacatggctcaggtgatgtccaaggcagagctgcgtttggcaaagctctacgcagacctgatcccagatacggaagtagccgagcgagtctattccgtcatccgcgaggagtacttcctgaccaagaagatgttctgcgtaatcaccggctctgatgatctgcttgatgacaacccacttctcgcacgctctgtccagcgccgatacccctacctgcttccactcaacgtgatccaggtagagatgatgcgacgctaccgaaaaggcgaccaaagcgagcaagtgtcccgcaacattcagctgaccatgaacggtctttccactgcgctgcgcaactccggc

SEQ ID NO: 138 - protein, 941 aa, Corynebacterium glutamicum
MLGDFLSHARQHPQCERVFKVVMTDFLRDDIRFLGQILGEVIAEQEGQEVYELVEQARLTSFDIAKGNAEMDSLVQVFDGITPAKATPIARAFSHFALLANLAEDLYDEELREQALDAGDTPPDSTLDATWLKLNEGNVGAEAVADVLRNAEVAPVLTAHPTETRRRTVFDAQKWITTHMRERHALQSAEPTARTQSKLDEIEKNIRRRITILWQTALIRVARPRIEDEIEVGLRYYKLSLLEEIPRINRDVAVELRERFGEGVPLKPVVKPGSWIGGDHDGNPYVTAETVEYSTHRAAETVLKYYARQLHSLEHELSLSDRMNKVTPQLLALADAGHNDVPSRVDEPYRRAVHGVRGRILATTAELIGEDAVEGVWFKVFTPYASPEEFLNDALTIDHSLRESKDVLIADDRLSVLISAIESFGFNLYALDLRQNSESYEDVLTELFERAQVTANYRELSEAEKLEVLLKELRSPRPLIPHGSDEYSEVTDRELGIFRTASEAVKKFGPRMVPHCIISMASSVTDVLEPMVLLKEFGLIAANGDNPRGTVDVIPLFETIEDLQAGAGILDELWKIDLYRNYLLQRDNVQEVMLGYSDSNKDGGYFSANWALYDAELQLVELCRSAGVKLRLFHGRGGTVGRGGGPSYDAILAQPRGAVQGSVRITEQGEIISAKYGNPETARRNLEALVSATLEASLLDVSELTDHQRAYDIMSEISELSLKKYASLVHEDQGFIDYFTQSTPLQEIGSLNIGSRPSSRKQTSSVEDLRAIPWVLSWSQSRVMLPGWFGVGTALEQWIGEGEQATQRIAELQTLNESWPFFTSVLDNMAQVMSKAELRLAKLYADLIPDTEVAERVYSVIREEYFLTKKMFCVITGSDDLLDDNPLLARSVQRRYPYLLPLNVIQVEMMRRYRKGDQSEQVSRNIQLTMNGLSTALRNSG

SEQ ID NO: 139 - DNA, 2757 bp, Corynebacterium glutamicum
  CDS (1)..(2757): RXA02259K
atgactgattttttacgcgatgacatcaggttcctcggtcaaatcctcggtgaggtaattgcggaacaagaaggccaggaggtttatgaactggtcgaacaagcgcgcctgacttcttttgatatcgccaagggcaacgccgaaatggatagcctggttcaggttttcgacggcattactccagccaaggcaacaccgattgctcgcgcattttcccacttcgctctgctggctaacctggcggaagacctctacgatgaagagcttcgtgaacaggctctcgatgcaggcgacacccctccggacagcactcttgatgccacctggctgaaactcaatgagggcaatgttggcgcagaagctgtggccgatgtgctgcgcaatgctgaggtggcgccggttctgactgcgcacccaactgagactcgccgccgcactgtttttgatgcgcaaaagtggatcaccacccacatgcgtgaacgccacgctttgcagtctgcggagcctaccgctcgtacgcaaagcaagttggatgagatcgagaagaacatccgccgtcgcatcaccattttgtggcagaccgcgttgattcgtgtggcccgcccacgtatcgaggacgagatcgaagtagggctgcgctactacaagctgagccttttggaagagattccacgtatcaaccgtgatgtggctgttgagcttcgtgagcgtttcggcgagggtgttcctttgaagcccgtggtcaagccaggttcctggattggtggagaccacgacggtaacccttatgtcaccgcggaaacagttgagtattccactcaccgcgctgcggaaaccgtgctcaagtactatgcacgccagctgcattccctcgagcatgagctcagcctgtcggaccgcatgaataaggtcaccccgcagctgcttgcgctggcagatgcagggcacaacgacgtgccaagccgcgtggatgagccttatcgacgcgccgtccatggcgttcgcggacgtatcctcgcgacgacggccgagctgatcggcgaggacgccgttgagggcgtgtggttcaaggtctttactccatacgcatctccggaagaattcttaaacgatgcgttgaccattgatcattctctgcgtgaatccaaggacgttctcattgccgatgatcgtttgtctgtgctgatttctgccatcgagagctttggattcaacctttacgcactggatctgcgccaaaactccgaaagctacgaggacgtcctcaccgagcttttcgaacgcgcccaagtcaccgcaaactaccgcgagctgtctgaagcagagaagcttgaggtgctgctgaaggaactgcgcagccctcgtccgctgatcccgcacggttcagatgaatacagcgaggtcaccgaccgcgagctcggcatcttccgcaccgcgtcggaggctgttaagaaattcgggccacggatggtgcctcactgcatcatctccatggcatcatcggtcaccgatgtgctcgagccgatggtgttgctcaaggaattcggactcatcgcagccaacggcgacaacccacgcggcaccgtcgatgtcatcccactgttcgaaaccatcgaagatctccaggccggcgccggaatcctcgacgaactgtggaaaattgatctctaccgcaactacctcctgcagcgcgacaacgtccaggaagtcatgctcggttactccgattccaacaaggatggcggatatttctccgcaaactgggcgctttacgacgcggaactgcagctcgtcgaactatgccgatcagccggggtcaagcttcgcctgttccacggccgtggtggcaccgtcggccgcggtggcggaccttcctacgacgcgattcttgcccagcccaggggggctgtccaaggttccgtgcgcatcaccgagcagggcgagatcatctccgctaagtacggcaaccccgaaaccgcgcgccgaaacctcgaagccctggtctcagccacgcttgaggcatcgcttctcgacgtctccgaactcaccgatcaccaacgcgcgtacgacatcatgagtgagatctctgagctcagcttgaagaagtacgcctccttggtgcacgaggatcaaggcttcatcgattacttcacccagtccacgccgctgcaggagattggatccctcaacatcggatccaggccttcctcacgcaagcagacctcctcggtggaagatttgcgagccatcccatgggtgctcagctggtcacagtctcgtgtcatgctgccaggctggtttggtgtcggaaccgcattagagcagtggattggcgaaggggagcaggccacccaacgcattgccgagctgcaaacactcaatgagtcctggccatttttcacctcagtgttggataacatggctcaggtgatgtccaaggcagagctgcgtttggcaaagctctacgcagacctgatcccagatacggaagtagccgagcgagtctattccgtcatccgcgaggagtacttcctgaccaagaagatgttctgcgtaatcaccggctctgatgatctgcttgatgacaacccacttctcgcacgctctgtccagcgccgatacccctacctgcttccactcaacgtgatccaggtagagatgatgcgacgctaccgaaaaggcgaccaaagcgagcaagtgtcccgcaacattcagctgaccatgaacggtctttccactgcgctgcgcaactccggc

SEQ ID NO: 140 - protein, 919 aa, Corynebacterium glutamicum
MTDFLRDDIRFLGQILGEVIAEQEGQEVYELVEQARLTSFDIAKGNAEMDSLVQVFDGITPAKATPIARAFSHFALLANLAEDLYDEELREQALDAGDTPPDSTLDATWLKLNEGNVGAEAVADVLRNAEVAPVLTAHPTETRRRTVFDAQKWITTHMRERHALQSAEPTARTQSKLDEIEKNIRRRITILWQTALIRVARPRIEDEIEVGLRYYKLSLLEEIPRINRDVAVELRERFGEGVPLKPVVKPGSWIGGDHDGNPYVTAETVEYSTHRAAETVLKYYARQLHSLEHELSLSDRMNKVTPQLLALADAGHNDVPSRVDEPYRRAVHGVRGRILATTAELIGEDAVEGVWFKVFTPYASPEEFLNDALTIDHSLRESKDVLIADDRLSVLISAIESFGFNLYALDLRQNSESYEDVLTELFERAQVTANYRELSEAEKLEVLLKELRSPRPLIPHGSDEYSEVTDRELGIFRTASEAVKKFGPRMVPHCIISMASSVTDVLEPMVLLKEFGLIAANGDNPRGTVDVIPLFETIEDLQAGAGILDELWKIDLYRNYLLQRDNVQEVMLGYSDSNKDGGYFSANWALYDAELQLVELCRSAGVKLRLFHGRGGTVGRGGGPSYDAILAQPRGAVQGSVRITEQGEIISAKYGNPETARRNLEALVSATLEASLLDVSELTDHQRAYDIMSEISELSLKKYASLVHEDQGFIDYFTQSTPLQEIGSLNIGSRPSSRKQTSSVEDLRAIPWVLSWSQSRVMLPGWFGVGTALEQWIGEGEQATQRIAELQTLNESWPFFTSVLDNMAQVMSKAELRLAKLYADLIPDTEVAERVYSVIREEYFLTKKMFCVITGSDDLLDDNPLLARSVQRRYPYLLPLNVIQVEMMRRYRKGDQSEQVSRNIQLTMNGLSTALRNSG

SEQ ID NO: 141 - DNA, 927 bp, Corynebacterium glutamicum
  CDS (1)..(927): RXA00970W
atggcaattgaactgaacgtcggtcgtaaggttaccgtcacggtacctggatcttctgcaaacctcggacctggctttgacactttaggtttggcactgtcggtatacgacactgtcgaagtggaaattattccatctggcttggaagtggaagtttttggcgaaggccaaggcgaagtccctcttgatggctcccacctggtggttaaagctattcgtgctggcctgaaggcagctgacgctgaagttcctggattgcgagtggtgtgccacaacaacattccgcagtctcgtggtcttggctcctctgctgcagcggcggttgctggtgttgctgcagctaatggtttggcggatttcccgctgactcaagagcagattgttcagttgtcctctgcctttgaaggccacccagataatgctgcggcttctgtgctgggtggagcagtggtgtcgtggacaaatctgtctatcgacggcaagagccagccacagtatgctgctgtaccacttgaggtgcaggacaatattcgtgcgactgcgctggttcctaatttccacgcatccaccgaagctgtgcgccgagtccttcccactgaagtcactcacatcgatgcgcgatttaacgtgtcccgcgttgcagtgatgatcgttgcgttgcagcagcgtcctgatttgctgtgggagggtactcgtgaccgtctgcaccagccttatcgtgcagaagtgttgcctattacctctgagtgggtaaaccgcctgcgcaaccgtggctacgcggcatacctttccggtgccggcccaaccgccatggtgctgtccactgagccaattccagacaaggttttggaagatgctcgtgagtctggcattaaggtgcttgagcttgaggttgcgggaccagtcaaggttgaagttaaccaacct

SEQ ID NO: 142 - protein, 309 aa, Corynebacterium glutamicum
MAIELNVGRKVTVTVPGSSANLGPGFDTLGLALSVYDTVEVEIIPSGLEVEVFGEGQGEVPLDGSHLVVKAIRAGLKAADAEVPGLRVVCHNNIPQSRGLGSSAAAAVAGVAAANGLADFPLTQEQIVQLSSAFEGHPDNAAASVLGGAVVSWTNLSIDGKSQPQYAAVPLEVQDNIRATALVPNFHASTEAVRRVLPTEVTHIDARFNVSRVAVMIVALQQRPDLLWEGTRDRLHQPYRAEVLPITSEWVNRLRNRGYAAYLSGAGPTAMVLSTEPIPDKVLEDARESGIKVLELEVAGPVKVEVNQP
